(19) United States
(12) Patent Application Publication
(10) Pub. No.: US 2019/0194291 A1
(43) Pub. Date: Jun. 27, 2019

(54) C-TERMINALLY FUSED TNF FAMILY LIGAND TRIMER-CONTAINING ANTIGEN BINDING MOLECULES

(71) Applicant: Hoffmann-La Roche Inc., Little Falls, NJ (US)

(72) Inventors: Peter Bruenker, Hittnau (CH); Claudia Ferrara Koller, Zug (CH); Sandra Grau-Richards, Birmensdorf (CH); Christian Klein, Bonstetten (CH); Ekkehard Moessner, Kreuzlingen (CH); Pablo Umana, Wollerau (CH); Maria Amann, Duebendorf (CH); Christina Claus, Ennetbaden (CH); Wei Xu, Schlieren (CH)

(73) Assignee: Hoffmann-La Roche Inc., Little Falls, NJ (US)

(21) Appl. No.: 16/184,147

(22) Filed: Nov. 8, 2018

Related U.S. Application Data
(63) Continuation of application No. PCT/EP2017/060863, filed on May 8, 2017.

(30) Foreign Application Priority Data
May 11, 2016 (EP) 16169237.1

(51) Int. Cl. C07K 14/705; C07K 16/40; C07K 16/28; C07K 16/30

(52) U.S. Cl. CPC C07K 14/70578; C07K 16/40; C07K 16/2803; C07K 2317/92; C07K 2319/30; C07K 2317/55; C07K 2317/24; C07K 16/3007

(57) ABSTRACT

The invention relates to novel TNF family ligand trimer-containing antigen binding molecules comprising (a) one Fab domain capable of specific binding to a target cell antigen, (b) a Fc domain composed of a first and a second subunit capable of stable association, and (c) a first polypeptide comprising two ectodomains of a TNF ligand family member or fragments thereof that are connected to each other by a peptide linker and a second polypeptide comprising one ectodomain of said TNF ligand family member or a fragment thereof, wherein the first polypeptide is fused at its N-terminus to the C-terminus of one of the subunits of the Fc domain and wherein the second polypeptide is fused at its N-terminus to the C-terminus of the other subunit of the Fc domain, wherein the TNF family ligand trimer-containing antigen binding molecule is monovalent for the binding to the target cell antigen.

### CROSS REFERENCE TO RELATED APPLICATIONS

[0001] This Application is a Continuation of International Patent Application PCT/EP/2017/060863 filed on May 8, 2017 which is entitled to the benefit of EP Patent Application No. 16169237.1 filed on May 11, 2016, the disclosures of which are incorporated herein by reference.

### SEQUENCE LISTING

[0002] The present application contains a Sequence Listing which has been submitted in ASCII format via EFS-Web and is hereby incorporated by reference in its entirety. Said ASCII copy, created on Nov. 7, 2018, is named P33591-US ST25.txt and is 663,074 in size.

### FIELD OF THE INVENTION

[0003] The invention relates to novel TNF family ligand trimer-containing antigen binding molecules comprising (a) a Fab domain capable of specific binding to a target cell antigen, (b) a Fc domain composed of a first and a second subunit capable of stable association, and (c) a first polypeptide comprising two ectodomains of a TNF ligand family member or fragments thereof that are connected to each other by a peptide linker and a second polypeptide comprising one ectodomain of said TNF ligand family member or a fragment thereof, wherein the first polypeptide is fused at its N-terminus to the C-terminus to one of the subunits of the Fc domain and wherein the second polypeptide is fused at its N-terminus to the C-terminus of the other subunit of the Fc domain, wherein the TNF family ligand trimer-containing antigen binding molecule is monovalent for the binding to the target cell antigen. The invention further relates to methods of producing these molecules and to methods of using the same.

### BACKGROUND

[0004] Ligands interacting with molecules of the TNF (tumor necrosis factor) receptor superfamily have pivotal roles in the organization and function of the immune system. While regulating normal functions such as immune responses, hematopoiesis and morphogenesis, the

[0005] TNF family ligands (also called cytokines) play a role in tumorgenesis, transplant rejection, septic shock, viral replication, bone resorption, rheumatoid arthritis and diabetes (Aggarwal, 2003). The TNF ligand family comprises 18 genes encoding 19 type II (i.e. intracellular N terminus and extracellular C-terminus) transmembrane proteins, characterized by the presence of a conserved C-terminal domain coined the ‘TNF homology domain’ (THD). This domain is responsible for receptor binding and is thus critical for the biological activity of the TNF ligand family members. The sequence identity between family members is ˜20-30% (Bodmer, 2002). Members of the TNF ligand family exert their biological function as self-assembling, noncovalent trimers (Banner et al, 1993). Thus, the TNF family ligands form a trimer that is able to bind to and to activate the corresponding receptors of TNFR superfamily.

[0006] 4-1BB (CD137), a member of the TNF receptor superfamily, has been first identified as a molecule whose expression is induced by T-cell activation (Kwon and Weissman, 1989). Subsequent studies demonstrated expression of 4-1BB in T- and B-lymphocytes (Snell et al., 2011; Zhang et al., 2010), NK-cells (Lin et al., 2008), NKT-cells (Kim et al., 2008), monocytes (Kienzle and von Kempis, 2000; Schwarz et al., 1995), neutrophils (Heinisch et al., 2000), mast (Nishimoto et al., 2005) and dendritic cells as well as cells of non-hematopoietic origin such as endothelial and smooth muscle cells (Broll et al., 2001; Olofsson et al., 2008). Expression of 4-1BB in different cell types is mostly inducible and driven by various stimulatory signals, such as T-cell receptor (TCR) or B-cell receptor triggering, as well as signaling induced through co-stimulatory molecules or receptors of pro-inflammatory cytokines (Diehl et al., 2002; von Kempis et al., 1997; Zhang et al., 2010).

[0007] Expression of 4-1BB ligand (4-1BBL or CD137L) is more restricted and is observed on professional antigen presenting cells (APC) such as B-cells, dendritic cells (DCs) and macrophages. Inducible expression of 4-1BBL is characteristic for T-cells, including both αβ and γδ T-cell subsets, and endothelial cells (reviewed in Shao and Schwarz, 2011).

[0008] CD137 signaling is known to stimulate IFNγ secretion and proliferation of NK cells (Buechele et al., 2012; Lin et al., 2008; Melero et al., 1998) as well as to promote DC activation as indicated by their increased survival and capacity to secret cytokines and upregulate co-stimulatory molecules (Choi et al., 2009; Futagawa et al., 2002; Wilcox et al., 2002). However, CD137 is best characterized as a co-stimulatory molecule which modulates TCR-induced activation in both the CD4⁺ and CD8⁺ subsets of T-cells. In combination with TCR triggering, agonistic 4-1BB-specific antibodies enhance proliferation of T-cells, stimulate lymphokine secretion and decrease sensitivity of T-lymphocytes to activation-induced cells death (reviewed in (reviewed in Snell et al., 2011).

[0009] In line with these co-stimulatory effects of 4-1BB antibodies on T-cells in vitro, their administration to tumor bearing mice leads to potent anti-tumor effects in many experimental tumor models (Melero et al., 1997; Narazaki et al., 2010). However, 4-1BB usually exhibits its potency as an anti-tumor agent only when administered in combination with other immunomodulatory compounds (Curran et al., 2011; Guo et al., 2013; Morales-Kastresana et al., 2013; Teng et al., 2009; Wei et al., 2013), chemotherapeutic reagents (Ju et al., 2008; Kim et al., 2009), tumor-specific vaccination (Cuadros et al., 2005; Lee et al., 2011) or radiotherapy (Shi and Siemann, 2006). In vivo depletion experiments demonstrated that CD8⁺ T-cells play the most critical role in anti-tumoral effect of 4-1BB-specific antibodies. However, depending on the tumor model or combination therapy, which includes anti-4-1BB, contributions of other types of cells such as DCs, NK-cells or CD4⁺ T-cells have been reported (Melero et al., 1997; Murillo et al., 2009; Narazaki et al., 2010; Stagg et al., 2011).

[0010] In addition to their direct effects on different lymphocyte subsets, 4-1BB agonists can also induce infiltration and retention of activated T-cells in the tumor through 4-1BB-mediated upregulation of intercellular adhesion molecule 1 (ICAM1) and vascular cell adhesion molecule 1 (VCAM1) on tumor vascular endothelium (Palazon et al., 2011).

[0011] 4-1BB triggering may also reverse the state of T-cell anergy induced by exposure to soluble antigen that may contribute to disruption of immunological tolerance in the tumor micro-environment or during chronic infections (Wilcox et al., 2004).

[0012] It appears that the immunomodulatory properties of 4-1BB agonistic antibodies in vivo require the presence of the wild type Fc-portion on the antibody molecule thereby implicating Fc-receptor binding as an important event required for the pharmacological activity of such reagents as has been described for agonistic antibodies specific to other apoptosis-inducing or immunomodulatory members of the TNFR-superfamily (Li and Ravetch, 2011; Teng et al., 2009). However, systemic administration of 4-1BB-specific agonistic antibodies with the functionally active Fc domain also induces expansion of CD8⁺ T-cells associated with liver toxicity (Dubrot et al., 2010) that is diminished or significantly ameliorated in the absence of functional Fc-receptors in mice. In human clinical trials (ClinicalTrials.gov, NCT00309023), Fc-competent 4-1BB agonistic antibodies (BMS-663513) administered once every three weeks for 12 weeks induced stabilization of the disease in patients with melanoma, ovarian or renal cell carcinoma. However, the same antibody given in another trial (NCT00612664) caused grade 4 hepatitis leading to termination of the trial (Simeone and Ascierto, 2012).

[0013] Collectively, the available pre-clinical and clinical data clearly demonstrate that there is a high clinical need for effective 4-1BB agonists. However, new generation drug candidates should not only effectively engage 4-1BB on the surface of hematopoietic and endothelial cells but also be capable of achieving that through mechanisms other than binding to Fc-receptors in order to avoid uncontrollable side effects. The latter may be accomplished through preferential binding to and oligomerization on tumor-specific or tumor-associated moieties.

[0014] Fusion proteins composed of one extracellular domain of a 4-1BB ligand and a single chain antibody fragment (Mueller et al., 2008; Hornig et al., 2012) or a single 4-1BB ligand fused to the C-terminus of a heavy chain (Zhang et al, 2007) have been made. WO 2010/010051 discloses the generation of fusion proteins that consist of three TNF ligand ectodomains linked to each other and fused to an antibody part.

[0015] However, there is still a need of new antigen binding molecules that combine a Fab domain capable of preferred binding to tumor-specific or tumor-associated targets with a moiety capable of forming a costimulatory TNF ligand trimer and that have at the same time sufficient stability to be pharmaceutically useful. The antigen binding molecules of the present invention comprise both and surprisingly they provide a trimeric and thus biologically active TNF ligand, although one of the trimerizing TNF ligand ectodomains is located on another polypeptide than the other two TNF ligand ectodomains of the molecule. Surprisingly, it has been found that one Fab domain capable of specific binding to a target cell antigen is sufficient to provide the preferred targeting properties. The antigen binding molecules of this invention are particularly stable and robust.

### SUMMARY OF THE INVENTION

[0016] In one aspect, the invention provides a TNF family ligand trimer-containing antigen binding molecule comprising
[0017] (a) one Fab domain capable of specific binding to a target cell antigen,
[0018] (b) a Fc domain composed of a first and a second subunit capable of stable association, and
[0019] (c) a first polypeptide comprising two ectodomains of a TNF ligand family member or fragments thereof that are connected to each other by a peptide linker and a second polypeptide comprising one ectodomain of said TNF ligand family member or a fragment thereof, wherein the first polypeptide is fused at its N-terminus to the C-terminus to one of the subunits of the Fc domain and wherein the second polypeptide is fused at its N-terminus to the C-terminus of the other subunit of the Fc domain, wherein the TNF family ligand trimer-containing antigen binding molecule is monovalent for the binding to the target cell antigen.

[0020] In a particular aspect, the TNF ligand family member is one that costimulates human T-cell activation. Thus, the TNF family ligand trimer-containing antigen binding molecule comprises (a) one Fab domain capable of specific binding to a target cell antigen, (b) a Fc domain composed of a first and a second subunit capable of stable association, and

(c) a first polypeptide comprising two ectodomains of a TNF ligand family member or fragments thereof that are connected to each other by a peptide linker and a second polypeptide comprising one ectodomain of said TNF ligand family member or a fragment thereof, wherein the first polypeptide is fused at its N-terminus to the C-terminus to one of the subunits of the Fc domain and wherein the second polypeptide is fused at its N-terminus to the C-terminus of the other subunit of the Fc domain, wherein the TNF family ligand trimer-containing antigen binding molecule is monovalent for the binding to the target cell antigen and wherein the TNF ligand family member costimulates human T-cell activation. More particularly, the TNF ligand family member is selected from 4-1BBL and OX40L.

[0021] In one aspect, the TNF ligand family member is 4-1BBL.

[0022] In a further aspect, the ectodomain of a TNF ligand family member comprises the amino acid sequence selected from the group consisting of SEQ ID NO:1, SEQ ID NO: 2, SEQ ID NO:3, SEQ ID NO:4, SEQ ID NO:5, SEQ ID NO:6, SEQ ID NO:7 and SEQ ID NO:8, particularly the amino acid sequence of SEQ ID NO:1 or SEQ ID NO:5.

[0023] In a further aspect, the TNF family ligand trimer-containing antigen binding molecule of the invention comprises
[0024] (a) one Fab domain capable of specific binding to a target cell antigen,
[0025] (b) a Fc domain composed of a first and a second subunit capable of stable association, and
[0026] (c) a first polypeptide comprising two ectodomains of a TNF ligand family member or fragments thereof that are connected to each other by a peptide linker and a second polypeptide comprising one ectodomain of said TNF ligand family member or a fragment thereof, wherein the first polypeptide is fused at its N-terminus to the C-terminus to one of the subunits of the Fc domain and wherein the second polypeptide is fused at its N-terminus to the C-terminus of the other subunit of the Fc domain and wherein the first polypeptide comprising two ectodomains of a TNF ligand family member or fragments thereof comprises an amino acid sequence selected from the group consisting of SEQ ID NO:9 and SEQ ID NO:10 and the second polypeptide comprising one ectodomain of said TNF ligand family member or a fragment thereof comprises the amino acid sequence selected from the group consisting of SEQ ID NO:1 and SEQ ID NO:5. In one aspect, the first polypeptide comprising two ectodomains of a TNF ligand family member or fragments thereof comprises an amino acid sequence SEQ ID NO:9 and the second polypeptide comprising one ectodomain of said TNF ligand family member or a fragment thereof comprises the amino acid sequence of SEQ ID NO:1. In a particular aspect, the first polypeptide comprising two ectodomains of a TNF ligand family member or fragments thereof comprises an amino acid sequence of SEQ ID NO:10 and the second polypeptide comprising one ectodomain of said TNF ligand family member or a fragment thereof comprises the amino acid sequence of SEQ ID NO:5.

[0027] In a further aspect, provided is aTNF family ligand trimer-containing antigen binding molecule as described herein before, wherein the TNF ligand family member is OX40L. In one aspect, provided is TNF family ligand trimer-containing antigen binding molecule, wherein the ectodomain of a TNF ligand family member comprises the amino acid sequence selected from the group consisting of SEQ ID NO:11 and SEQ ID NO:12.

[0028] In one aspect, the invention provides a TNF family ligand trimer-containing antigen binding molecule comprising
[0029] (a) one Fab domain capable of specific binding to a target cell antigen,
[0030] (b) a Fc domain composed of a first and a second subunit capable of stable association, and
[0031] (c) a first polypeptide comprising two ectodomains of a TNF ligand family member or fragments thereof that are connected to each other by a peptide linker and a second polypeptide comprising one ectodomain of said TNF ligand family member or a fragment thereof, wherein the first polypeptide is fused at its N-terminus to the C-terminus to one of the subunits of the Fc domain and wherein the second polypeptide is fused at its N-terminus to the C-terminus of the other subunit of the Fc domain. The invention thus relates to a TNF family ligand trimer-containing antigen binding molecule, wherein TNF family ligand trimer-containing antigen binding molecule is monovalent for the binding to the target cell antigen.

[0032] In another aspect, provided is a TNF family ligand trimer-containing antigen binding molecule of the invention, wherein the target cell antigen is selected from the group consisting of Fibroblast Activation Protein (FAP), CD19, Carcinoembryonic Antigen (CEA), Melanoma-associated Chondroitin Sulfate Proteoglycan (MCSP), Epidermal Growth Factor Receptor (EGFR), CD20 and CD33.

[0033] In a particular aspect, the target cell antigen is Fibroblast Activation Protein (FAP).

[0034] In one aspect, the invention provides a TNF family ligand trimer-containing antigen binding molecule, wherein the Fab domain capable of specific binding to FAP comprises
[0035] (a) a VH domain comprising (i) CDR-H1 comprising the amino acid sequence of SEQ ID NO:13, (ii) CDR-H2 comprising the amino acid sequence of SEQ ID NO:14 and (iii) CDR-H3 comprising the amino acid sequence of SEQ ID NO:15, and a VL domain comprising (iv) CDR-L1 comprising the amino acid sequence of SEQ ID NO:16, (v) CDR-L2 comprising the amino acid sequence of SEQ ID NO:17 and (vi) CDR-L3 comprising the amino acid sequence of SEQ ID NO:18 or
[0036] (b) a VH domain comprising (i) CDR-H1 comprising the amino acid sequence of SEQ ID NO:19, (ii) CDR-H2 comprising the amino acid sequence of SEQ ID NO:20 and (iii) CDR-H3 comprising the amino acid sequence of SEQ ID NO:21, and a VL domain comprising (iv) CDR-L1 comprising the amino acid sequence of SEQ ID NO:22, (v) CDR-L2 comprising the amino acid sequence of SEQ ID NO:23 and (vi) CDR-L3 comprising the amino acid sequence of SEQ ID NO:24.

[0037] In a particular aspect, the invention provides a TNF family ligand trimer-containing antigen binding molecule, wherein the Fab domain capable of specific binding to FAP comprises a VH domain comprising (i) CDR-H1 comprising the amino acid sequence of SEQ ID NO:19, (ii) CDR-H2 comprising the amino acid sequence of SEQ ID NO:20 and (iii) CDR-H3 comprising the amino acid sequence of SEQ ID NO:21, and a VL domain comprising (iv) CDR-L1 comprising the amino acid sequence of SEQ ID NO:22, (v) CDR-L2 comprising the amino acid sequence of SEQ ID NO:23 and (vi) CDR-L3 comprising the amino acid sequence of SEQ ID NO:24.

[0038] In a further aspect, provided is a TNF family ligand trimer-containing antigen binding molecule as described herein before, wherein the Fab domain capable of specific binding to FAP comprises a variable heavy chain comprising an amino acid sequence of SEQ ID NO:25 and a variable light chain comprising an amino acid sequence of SEQ ID NO:26 or wherein the Fab domain capable of specific binding to FAP comprises a variable heavy chain comprising an amino acid sequence of SEQ ID NO:27 and a variable light chain comprising an amino acid sequence of SEQ ID NO:28.

[0039] In another particular aspect, the target cell antigen is CD19.

[0040] In one aspect, the invention provides a TNF family ligand trimer-containing antigen binding molecule, wherein the Fab domain capable of specific binding to CD19 comprises
[0041] (a) a VH domain comprising (i) CDR-H1 comprising the amino acid sequence of SEQ ID NO:29, (ii) CDR-H2 comprising the amino acid sequence of SEQ ID NO:30 and (iii) CDR-H3 comprising the amino acid sequence of SEQ ID NO:31, and a VL domain comprising (iv) CDR-L1 comprising the amino acid sequence of SEQ ID NO:32, (v) CDR-L2 comprising the amino acid sequence of SEQ ID NO:33 and (vi) CDR-L3 comprising the amino acid sequence of SEQ ID NO:34 or
[0042] (b) a VH domain comprising (i) CDR-H1 comprising the amino acid sequence of SEQ ID NO:35, (ii) CDR-H2 comprising the amino acid sequence of SEQ ID NO:36 and (iii) CDR-H3 comprising the amino acid sequence of SEQ ID NO:37, and a VL domain comprising (iv) CDR-L1 comprising the amino acid sequence of SEQ ID NO:38, (v) CDR-L2 comprising the amino acid sequence of SEQ ID NO:39 and (vi) CDR-L3 comprising the amino acid sequence of SEQ ID NO:40.

[0043] In a particular aspect, the invention provides a TNF family ligand trimer-containing antigen binding molecule, wherein the Fab domain capable of specific binding to CD19 comprises a VH domain comprising (i) CDR-H1 comprising the amino acid sequence of SEQ ID NO:35, (ii) CDR-H2 comprising the amino acid sequence of SEQ ID NO:36 and (iii) CDR-H3 comprising the amino acid sequence of SEQ ID NO:37, and a VL domain comprising (iv) CDR-L1 comprising the amino acid sequence of SEQ ID NO:38, (v) CDR-L2 comprising the amino acid sequence of SEQ ID NO:39 and (vi) CDR-L3 comprising the amino acid sequence of SEQ ID NO:40.

[0044] In a further aspect, provided is a TNF family ligand trimer-containing antigen binding molecule as described herein before, wherein the Fab domain capable of specific binding to CD19 comprises a variable heavy chain comprising an amino acid sequence of SEQ ID NO:41 and a variable light chain comprising an amino acid sequence of SEQ ID NO:42 or wherein the Fab domain capable of specific binding to FAP comprises a variable heavy chain comprising an amino acid sequence of SEQ ID NO:43 and a variable light chain comprising an amino acid sequence of SEQ ID NO:44.

[0045] In another particular aspect, the target cell antigen is CEA.

[0046] In one aspect, the invention provides a TNF family ligand trimer-containing antigen binding molecule, wherein the Fab domain capable of specific binding to CEA comprises a VH domain comprising (i) CDR-H1 comprising the amino acid sequence of SEQ ID NO:45, (ii) CDR-H2 comprising the amino acid sequence of SEQ ID NO:46 and (iii) CDR-H3 comprising the amino acid sequence of SEQ ID NO:47, and a VL domain comprising (iv) CDR-L1 comprising the amino acid sequence of SEQ ID NO:48, (v) CDR-L2 comprising the amino acid sequence of SEQ ID NO:49 and (vi) CDR-L3 comprising the amino acid sequence of SEQ ID NO:50.

[0047] In a particular aspect, provided is a TNF family ligand trimer-containing antigen binding molecule as described herein before, wherein the Fab domain capable of specific binding to CEA comprises a variable heavy chain comprising an amino acid sequence of SEQ ID NO:51 and a variable light chain comprising an amino acid sequence of SEQ ID NO:52.

[0048] In a further aspect, the Fc domain is an IgG, particularly an IgG1 Fc domain or an IgG4 Fc domain. More particularly, the Fc domain is an IgG1 Fc domain.

[0049] In particular, the TNF family ligand trimer-containing antigen binding molecule of the invention comprises a Fab domain capable of specific binding to a target cell antigen, wherein the VH and CH1 domain of the Fab domain are fused at the C-terminus to the N-terminus of a CH2 domain in the Fc domain.

[0050] In another aspect, the invention is concerned with a TNF family ligand trimer-containing antigen binding molecule as defined herein before, comprising

(b) an Fc domain composed of a first and a second subunit capable of stable association, wherein the Fc domain comprises one or more amino acid substitution that reduces binding to an Fc receptor, in particular towards Fcγ receptor.

[0051] In particular, the Fc domain comprises amino acid substitutions at positions 234 and 235 (numbering according to Kabat EU index) and/or 329 (numbering according to Kabat EU index) of the IgG heavy chains. More particularly, provided is a trimeric TNF family ligand-containing antigen binding molecule according to the invention which comprises an IgG1 Fc domain with the amino acid substitutions L234A, L235A and P329G (numbering according to Kabat EU index).

[0052] In a further aspect, the Fc domain comprises a modification promoting the association of the first and second subunit of the Fc domain. In a particular aspect, provided is a TNF family ligand trimer-containing antigen binding molecule as defined herein before, wherein the first subunit of the Fc domain comprises the amino acid substitutions S354C and T366W (numbering according to Kabat EU index) of the knob and the second subunit of the Fc domain comprises the amino acid substitutions Y349C, T366S, L368A and Y407V (numbering according to Kabat EU index) of the hole.

[0053] In a further aspect, provided is a TNF family ligand trimer-containing antigen binding molecule as defined herein before, wherein the first polypeptide comprising two ectodomains of a TNF ligand family member or fragments thereof that are connected to each other by a peptide linker is fused at its N-terminus to the C-terminus of the second subunit of the Fc domain (hole) and the second polypeptide comprising one ectodomain of said TNF ligand family member or a fragment thereof is fused at its N-terminus to the C-terminus of the first subunit of the Fc domain (knob).

[0054] In another aspect, provided is a TNF family ligand trimer-containing antigen binding molecule as defined herein before, wherein the first polypeptide comprising two ectodomains of a TNF ligand family member or fragments thereof that are connected to each other by a peptide linker is fused at its N-terminus to the C-terminus of the first subunit of the Fc domain (knob) and the second polypeptide comprising one ectodomain of said TNF ligand family member or a fragment thereof is fused at its N-terminus to the C-terminus of the second subunit of the Fc domain (hole).

[0055] In one aspect, the invention provides a TNF family ligand trimer-containing antigen binding molecule, wherein the Fab domain capable of specific binding to a target cell antigen is fused at the C-terminus to the N-terminus of the first subunit of the Fc domain (knob). In another aspect, provided is a TNF family ligand trimer-containing antigen binding molecule, wherein the Fab domain capable of specific binding to a target cell antigen is fused at the C-terminus to the N-terminus of the second subunit of the Fc domain (hole).

[0056] In a particular aspect, provided is a TNF family ligand trimer-containing antigen binding molecule, wherein the Fab domain capable of specific binding to a target cell antigen is fused at the C-terminus to the N-terminus of the first subunit of the Fc domain (knob), the first polypeptide comprising two ectodomains of a TNF ligand family member or fragments thereof that are connected to each other by a peptide linker is fused at its N-terminus to the C-terminus of the second subunit of the Fc domain (hole) and the second polypeptide comprising one ectodomain of said TNF ligand family member or a fragment thereof is fused at its N-terminus to the C-terminus of the first subunit of the Fc domain (knob).

[0057] In a further aspect, provided is a TNF family ligand trimer-containing antigen binding molecule, comprising
[0058] (a) a Fab domain capable of specific binding to a target cell antigen,
[0059] (b) a Fc domain composed of a first and a second subunit capable of stable association, and
[0060] (c) a first polypeptide comprising two ectodomains of a TNF ligand family member or fragments thereof that are connected to each other by a peptide linker and a second polypeptide comprising one ectodomain of said TNF ligand family member or a fragment thereof, wherein the first polypeptide is fused at its N-terminus to the C-terminus to the second subunit of the Fc domain comprising the knob mutations and wherein the second polypeptide is fused at its N-terminus to the C-terminus of the first subunit of the Fc domain comprising the hole mutations and wherein the VH and CH1 domain of the Fab domain capable of specific binding to a target cell antigen is fused at the C-terminus to the N-terminus of the second subunit of the Fc domain comprising the knob mutations.

[0061] In another aspect, provided is a TNF family ligand trimer-containing antigen binding molecule, comprising
[0062] (a) a Fab domain capable of specific binding to a target cell antigen,
[0063] (b) a Fc domain composed of a first and a second subunit capable of stable association, and
[0064] (c) a first polypeptide comprising two ectodomains of a TNF ligand family member or fragments thereof that are connected to each other by a peptide linker and a second polypeptide comprising one ectodomain of said TNF ligand family member or a fragment thereof, wherein the first polypeptide is fused at its N-terminus to the C-terminus to the second subunit of the Fc domain comprising the knob mutations and wherein the second polypeptide is fused at its N-terminus to the C-terminus of the first subunit of the Fc domain comprising the hole mutations and wherein the VH and CH1 domain of the Fab domain capable of specific binding to a target cell antigen is fused at the C-terminus to the N-terminus of the first subunit of the Fc domain comprising the hole mutations.

[0065] In yet another aspect, provided is a TNF family ligand trimer-containing antigen binding molecule, comprising
[0066] (a) a Fab domain capable of specific binding to a target cell antigen,
[0067] (b) a Fc domain composed of a first and a second subunit capable of stable association, and
[0068] (c) a first polypeptide comprising two ectodomains of a TNF ligand family member or fragments thereof that are connected to each other by a peptide linker and a second polypeptide comprising one ectodomain of said TNF ligand family member or a fragment thereof, wherein the first polypeptide is fused at its N-terminus to the C-terminus to the first subunit of the Fc domain comprising the hole mutations and wherein the second polypeptide is fused at its N-terminus to the C-terminus of the second subunit of the Fc domain comprising the knob mutations and wherein the VH and CH1 domain of the Fab domain capable of specific binding to a target cell antigen is fused at the C-terminus to the N-terminus of the second subunit of the Fc domain comprising the knob mutations.

[0069] In addition, provided is a TNF family ligand trimer-containing antigen binding molecule, comprising
[0070] (a) a Fab domain capable of specific binding to a target cell antigen,
[0071] (b) a Fc domain composed of a first and a second subunit capable of stable association, and
[0072] (c) a first polypeptide comprising two ectodomains of a TNF ligand family member or fragments thereof that are connected to each other by a peptide linker and a second polypeptide comprising one ectodomain of said TNF ligand family member or a fragment thereof, wherein the first polypeptide is fused at its N-terminus to the C-terminus to the first subunit of the Fc domain comprising the hole mutations and wherein the second polypeptide is fused at its N-terminus to the C-terminus of the second subunit of the Fc domain comprising the knob mutations and wherein the VH and CH1 domain of the Fab domain capable of specific binding to a target cell antigen is fused at the C-terminus to the N-terminus of the first subunit of the Fc domain comprising the hole mutations.

[0073] In a further aspect, the invention provides a TNF family ligand trimer-containing antigen binding molecule as defined before further comprising (d) a Fab domain that is not capable of specific binding to a target cell antigen. Thus, the invention provides a TNF family ligand trimer-containing antigen binding molecule comprising
[0074] (a) a Fab domain capable of specific binding to a target cell antigen,
[0075] (b) a Fc domain composed of a first and a second subunit capable of stable association,
[0076] (c) a first polypeptide comprising two ectodomains of a TNF ligand family member or fragments thereof that are connected to each other by a peptide linker and a second polypeptide comprising one ectodomain of said TNF ligand family member or a fragment thereof, wherein the first polypeptide is fused at its N-terminus to the C-terminus to one of the subunits of the Fc domain and wherein the second polypeptide is fused at its N-terminus to the C-terminus of the other subunit of the Fc domain, and
[0077] (d) a Fab domain that is not capable of specific binding to a target cell antigen.

[0078] According to another aspect of the invention, there is provided an isolated polynucleotide encoding a TNF family ligand trimer-containing antigen binding molecule as defined herein before. The invention further provides a vector, particularly an expression vector, comprising the isolated polynucleotide of the invention and a host cell comprising the isolated polynucleotide or the vector of the invention. In some embodiments the host cell is a eukaryotic cell, particularly a mammalian cell.

[0079] In another aspect, provided is a method for producing the TNF family ligand trimer-containing antigen binding molecule of the invention, comprising the steps of (i) culturing the host cell of the invention under conditions suitable for expression of the antigen binding molecule, and (ii) recovering the antigen binding molecule. The invention also encompasses a TNF family ligand trimer-containing antigen binding molecule produced by the method of the invention.

[0080] The invention further provides a pharmaceutical composition comprising the TNF family ligand trimer-containing antigen binding molecule of the invention and at least one pharmaceutically acceptable excipient.

[0081] Also encompassed by the invention is the TNF family ligand trimer-containing antigen binding molecule of the invention, or the pharmaceutical composition of the invention, for use as a medicament. In one aspect is provided the TNF family ligand trimer-containing antigen binding molecule of the invention, or the pharmaceutical composition of the invention, for use in the treatment of a disease in an individual in need thereof. The present invention also provides the TNF family ligand trimer-containing antigen binding molecule of the invention, or the pharmaceutical composition of the invention, for use (i) in stimulating T cell response, (ii) in supporting survival of activated T cells, (iii) in the treatment of infections, (iv) in the treatment of cancer, (v) in delaying progression of cancer, or (vi) in prolonging the survival of a patient suffering from cancer. In a specific embodiment, provided is the TNF family ligand trimer-containing antigen binding molecule of the invention, or the pharmaceutical composition of the invention, for use in the treatment of cancer.

[0082] Also provided is the use of the TNF family ligand trimer-containing antigen binding molecule of the invention for the manufacture of a medicament for the treatment of a disease in an individual in need thereof, in particular for the manufacture of a medicament for the treatment of cancer, as well as a method of treating a disease in an individual, comprising administering to said individual a therapeutically effective amount of a composition comprising the TNF family ligand trimer-containing antigen binding molecule of the invention in a pharmaceutically acceptable form. In a specific embodiment, the disease is cancer. The present invention also provides the use of the TNF family ligand trimer-containing antigen binding molecule of the invention, or the pharmaceutical composition of the invention, in the manufacture of a medicament for up-regulating or prolonging cytotoxic T cell activity. Also provided is a method of up-regulating or prolonging cytotoxic T cell activity in an individual having cancer, comprising administering to the individual an effective amount of the TNF family ligand trimer-containing antigen binding molecule of the invention, or the pharmaceutical composition of the invention. In any of the above embodiments the individual is preferably a mammal, particularly a human.

### BRIEF DESCRIPTION OF THE DRAWINGS

[0083] FIGS. 1A to 1D show the components for the assembly of split trimeric human 4-1BB ligands. FIG. 1A shows the polypeptide comprising the dimeric 4-1BB ligand that is fused at the N-terminus to the C-terminus of a human CH3 domain by a peptide linker (G4S)₂ and FIG. 1B shows the polypeptide comprising the monomeric 4-1BB ligand that is fused at the N-terminus to the C-terminus of the other CH3 domain within a Fc domain by a peptide linker (G4S)₂. FIG. 1C shows a dimeric OX40 ligand that is fused at the N-terminus by a peptide linker (G4S)₂ to the C-terminus of a human CH3 domain and FIG. 1D shows a monomeric ligand fused at the N-terminus to the C-terminus of the other human CH3 domain within the Fc domain by a peptide linker (G4S)₂.

[0084] FIGS. 2A to 2D are schematic drawings of the structures of the monovalent targeted 4-1BBL-trimer-containing antigen binding molecules of the invention. In FIG. 2A is shown the antigen binding molecule as construct of type x.11, wherein the Fab domain capable of specific binding to a target cell antigen is attached to the Fc knob chain, the dimeric 4-1BBL is fused to the C-terminus of the Fc hole chain and the monomeric 4-1BBL is fused to the C-terminus of the Fc knob chain. Constructs 2.11, 1.11, 3.11, 4.11, 5.11 and Control H are corresponding examples. A construct of type x.12 is shown in FIG. 2B. The Fab domain capable of specific binding to a target cell antigen is attached to the Fc knob chain, the dimeric 4-1BBL is also fused to the C-terminus of the Fc knob chain and the monomeric 4-1BBL is fused to the C-terminus of the Fc hole chain. Constructs 2.12, 1.12, 3.12, 4.12, 5.12 and Control I are examples for these antigen binding molecules. In FIG. 2C is shown the antigen binding molecule as construct of type x.13, wherein the Fab domain capable of specific binding to a target cell antigen is attached to the Fc hole chain, the dimeric 4-1BBL is fused to the C-terminus of the Fc hole chain and the monomeric 4-1BBL is fused to the C-terminus of the Fc knob chain. Constructs 2.13, 1.13, 3.13, 4.13, 5.13 and Control J are corresponding examples. FIG. 2D relates to constructs of type x.14, wherein the Fab domain capable of specific binding to a target cell antigen is attached to the Fc hole chain, the dimeric 4-1BBL is also fused to the C-terminus of the Fc knob chain and the monomeric 4-1BBL is fused to the C-terminus of the Fc hole chain. Constructs 2.14, 1.14, 3.14, 4.14, 5.14 and Control K are examples therefore. The preparation of all these constructs is described in Example 1. The VH, VL, CL and CH1 domains symbolize the Fab domain, the thick black point stands for the knob-into-hole modification.

[0085] FIGS. 3A to 3D are schematic drawings of further molecules described herein. FIG. 3A shows Control F, a hu IgG1 with two DP47 (germline) untargeted Fab domains. FIG. 3B shows Control D, an untargeted 4-1BBL trimer-containing antigen binding molecule, wherein the dimeric 4-1BBL is fused to the N-terminus of CL domain in the Fc knob heavy chain and the monomeric 4-1BBL is fused to the N-terminus of a CH1 domain of a light chain. * symbolizes amino acid modifications in the CH1 and CL domain (so-called charged residues). FIG. 3C shows the same construct as FIG. 3B, however the DP47 Fab domain is replaced by FAP(4B9) Fab domain. The preparation and production of these constructs is described in Example 1.11. The thick black point stands for the knob-into-hole modification. FIG. 3D is a drawing of the monomeric 4-1BB Fc(kih) construct as prepared in Example 3.1.

[0086] FIG. 4A shows the setup of the SPR experiments for simultaneous binding of the monovalent targeted split trimeric C-terminal 4-1BB ligand-containing antigen binding molecules of the invention. The simultaneous binding to human 4-1BB and human FAP of the FAP (4B9)-targeted split 4-1BBL (71-248) Fc kih antigen binding molecule Construct 2.11 is shown in FIG. 4B. Simultaneous binding to human 4-1BB and human CD19 of CD19(8B8-018)-targeted split 4-1BBL (71-248) Fc kih antigen binding molecule (Construct 3.11) is shown in FIG. 4C. Simultaneous binding to human 4-1BB and human CD19 of the CD19(8B8-2B11)-targeted split 4-1BBL (71-248) Fc kih antigen binding molecule (construct 4.11) is shown in FIG. 4D.

[0087] FIGS. 5A to 5D are schematic drawings of the structures of the monovalent targeted 4-1BBL-trimer-containing antigen binding molecules of the invention that comprise a further Fab domain that is not capable for binding to a target cell antigen. In FIG. 5A is shown the antigen binding molecule as construct of type x.15, wherein the Fab domain not capable of specific binding to a target cell antigen (DP47 germline) is attached to the Fc knob chain, the Fab domain capable of specific binding to the antigen (FAP) is connected to the Fc hole chain, the dimeric 4-1BBL is fused to the C-terminus of the Fc hole chain and the monomeric 4-1BBL is fused to the C-terminus of the Fc knob chain. Construct 2.15 is an example thereof. A construct of type x.16 is shown in FIG. 5B. The Fab domain not capable of specific binding to a target cell antigen (DP47 germline) is attached to the Fc knob chain, the Fab domain capable of specific binding to the antigen (FAP) is connected to the Fc hole chain, the dimeric 4-1BBL is also fused to the C-terminus of the Fc knob chain and the monomeric 4-1BBL is fused to the C-terminus of the Fc hole chain. Construct 2.16 is an example thereof. In FIG. 5C is shown the antigen binding molecule as construct of type x.17, wherein the Fab domain capable of specific binding to a target cell antigen is attached to the Fc knob chain, the Fab domain not capable of specific binding to a target cell antigen (DP47 germline) is connected to the Fc hole chain, the dimeric 4-1BBL is fused to the C-terminus of the Fc hole chain and the monomeric 4-1BBL is fused to the C-terminus of the Fc knob chain. Construct 2.17 is an example thereof. FIG. 5D relates to constructs of type x.18, wherein the Fab domain capable of specific binding to a target cell antigen is attached to the Fc knob chain, the Fab domain not capable of specific binding to a target cell antigen (DP47 germline) is attached to the Fc hole chain, the dimeric 4-1BBL is also fused to the C-terminus of the Fc knob chain and the monomeric 4-1BBL is fused to the C-terminus of the Fc hole chain. Construct 2.18 is an example thereof. The preparation of all these constructs is described in Example 4.

[0088] FIG. 6A shows the setup of the SPR experiments for simultaneous binding of the DP47/monovalent FAP targeted split trimeric C-terminal 4-1BB ligand-containing antigen binding molecules of the invention. The simultaneous binding to human 4-1BB and human FAP of the DP47/FAP (4B9)-targeted split 4-1BBL (71-254) Fc kih antigen binding molecule Construct 2.15 is shown in FIG. 6B.

[0089] In FIGS. 7A to 7H is shown the binding of FAP-targeted split trimeric 4-1BB ligand Fc fusion antigen binding molecules to freshly isolated PBMCs. Shown is the geometric (geo) mean of fluorescence intensity of PE-conjugated secondary detection antibody versus the concentration of tested constructs. As negative controls control F and control D and as positive control construct 2.4 (described in Example 1.11) were used. In FIGS. 7A to 7D the binding of Construct 2.11 and in FIGS. 7E to 7H the binding of Construct 2.15 is illustrated. The structure of construct 2.11 is shown in FIG. 2A and the structure of Construct 2.15 is shown in FIG. 5A. Binding was monitored on fresh human CD45⁺ CD3⁺ CD8^{neg} CD4⁺ T cells (FIGS. 7A or 7E), fresh human CD45⁺ CD3⁺ CD4^{neg} CD8⁺ T cells (FIGS. 7B or 7F), fresh human CD45⁺ CD3⁺ CD4^{neg} CD8^{neg} γδ T cells (FIGS. 7C or 7G) and CD45⁺ CD3^{neg} CD19⁺ B cells (FIGS. 7D or 7H). Because the majority of fresh isolated PBMCs do not express 4-1BB or FAP, no binding could be detected.

[0090] FIGS. 8A to 8F illustrate the binding of FAP-targeted split trimeric 4-1BB ligand Fc fusion antigen binding molecules to activated human PBMCs. Shown is the geo mean of fluorescence intensity of PE-conjugated secondary detection antibody versus the concentration of tested constructs. As negative controls control F and control D and as positive control construct 2.4 as described in Example 1.11 were used. In FIGS. 8A to 8C the binding of Construct 2.11 and in FIGS. 8D to 8F the binding of Construct 2.15 is illustrated. After activation with agonistic anti-human CD28 and anti-human CD3 antibody 4-1BB expression is upregulated on the majority of CD3⁺ CD8⁺ T cells and to a lesser extend to the majority CD3⁺ CD4⁺ and CD⁺ CD4^{neg} CD8^{neg} γδ T cells. All constructs containing a fused 4-1BB split trimeric ligand (control D, construct 2.4, constructs 2.11 and 2.15) bind with a quite similar affinity to human 4-1BB, independent if they are FAP (4B9)-targeted (construct 2.4 and 2.11) or DP47-untargeted (control D), whereas the untargeted molecule without a fused 4-1BB split trimeric ligand (control F) does not bind to the activated human T cells.

[0091] FIGS. 9A to 9D show the binding of FAP-targeted or untargeted split trimeric human 4-1BB ligand Fc (kih) fusion antigen binding molecules to human-FAP expressing human melanoma MV-3 cells and WM-266-4 cells. Binding was detected with R-Phycoerythrin-fluorochrome conjugated anti-human IgG Fcγ-specific goat IgG F(ab′)2 fragment. As negative controls control F and D and as positive control Construct 2.4 as described in Example 1.11 were used. Shown is the geo mean of fluorescence intensity versus the concentration of tested constructs and controls. In FIGS. 9A (MV-3 cells) and 9B (WM-266-4 cells) the binding of Construct 2.11 in comparison to the control molecules is shown and in FIGS. 9C (MV-3 cells) and 9D (WM-266-4 cells) the binding of Construct 2.15 in comparison to the control molecules is shown. All FAP-targeted constructs bind with a similar affinity to human FAP.

[0092] FIG. 10 shows a scheme that illustrates the general principal of the NFkB activity assay described in Example 6.3 using a reporter cell line. Shown is the activation assay set up with human 4-1BB expressing HeLa reporter cell line. A crosslinking of 4-1BB expressed on the reporter cells induces NFκB activation and NFκB-mediated Luciferase expression. After lysis of the cells Luciferase can catalyze the oxidation of Luciferin to Oxyluciferin. This chemical reaction correlates positively with the strength of NFκB-mediated luciferase expression and can be measured by the strength of light emission (units of released light).

[0093] FIGS. 11A to 11C shows that the activation of the NFkB signaling pathway by FAP-targeted 4-1BB ligand trimer-containing Fc(kih) fusion antigen binding molecule is strictly dependent on its binding to FAP-expressing target cells. Human 4-1BB expressing NFkB reporter HeLa cells were co-cultured with the indicated tumor cells exhibiting different levels of cell surface FAP expression. Units of released light (URL) are measured for 0.5 s/well and plotted against the used concentration of Construct 2.11 or Construct 2.15 or (as positive control) Construct 2.4 or (as negative controls) Control D or F. Human 4-1BB-expressing HeLa-reporter cells were incubated for 6 h in the absence (FIG. 11A) or presence of crosslinking human-FAP expressing human melanoma cell line MV-3 (see FIG. 11B) or 3T3-huFAP clone 19 (see FIG. 11C) and then Luciferase activity was assessed as described in Example 6.3. The cell ratio of 4-1BB-expressing HeLa reporter cell to tumor cells are indicated in each set up.

[0094] FIG. 12 shows a schematic scheme of the human PBMC Activation assas as described in Example 6.4. Activation of PBMCs is achieved in the presence of FAP-expressing Fibroblasts, agonistic anti-human CD3 antibody and bispecific anti-FAP split trimeric 4-1BBL fusion antigen binding molecule construct 2.11. The content per well in the plate was: 45 Gy irradiated 2×10⁴ NIH/3T3-human FAP clone 19, 7.5×10⁶ CFSE-labeled human PBMCs, 0.5 nM agonistic anti-human CD3 human IgG wt (clone V9) and 10⁻⁵ nM to 10 nM titrated concentrations of construct 2.11, construct 2.4, control D or control F. The incubation time was 4 days.

[0095] In FIGS. 13A and 13B results in the human PBMC activation assay in the presence of FAP+ fibroblasts, agonistic CD3 antibody and FAP-targeted split trimeric 4-1BBL fusion molecules are shown. The percentage of CD25 and CD137 (4-1BB) expressing CD8⁺ T cells are plotted against the used concentration of construct 2.11 or as positive control construct 2.4 or as negative control molecules control D and control F (see Example 1.11).

[0096] FIG. 14 shows the schematic set-up of the NLV-specific CD8+ T cells activation in the presence of NLV-peptide pulsed FAP-expressing MV-3 human melanoma cells and bispecific anti-FAP split trimeric 4-1BBL fusion molecule construct 2.11. The content per well in the plate was: 5×10⁴ human melanoma cells MV-3, pulsed with no, 10⁻⁹ or 10⁻⁸ M NLV-peptide, 6250 CFSE-labeled NLV-specific CD8 T cells and 10⁻⁵ nM to 10 nM titrated concentrations of construct 2.11, construct 2.4, control D or control F. The incubation time was 24 h+4 h in the presence of Brefeldin A and Monesin.

[0097] In FIGS. 15A to 15F results are shown from the activation assay with HLA-A2-NLV-specific CD8 T cells and NLV-pulsed HLA-A2⁺ FAP⁺ human melanoma cell line MV-3 in the presence of titrated concentration of different FAP-targeted or untargeted split trimeric human 4-1BB ligand Fc (kih) antigen binding molecules. The percentage of CD137 (4-1BB) and IFNγ expressing NLV-specific CD8⁺ T cells are plotted against the used concentration of the test compounds (construct 2.11 or as positive control construct 2.4 or as negative controls control D and control F). All FAP-targeted split trimeric human 4-1BB ligand Fc (kih) antigen binding molecules show a similar activation improvement of HLA-A2-NLV-peptide specific CD8 T cells shown in FIGS. 15A-C as CD137 (4-1BB)-upregulation (positive feedback loop) and in FIGS. 15D-F as IFNγ expression after 24 h of stimulation. Differences of curves lie in the range of normal error deviation and are not significant.

[0098] FIGS. 16A and 16B show the binding of CD19-targeted split trimeric 4-1BBL Fc (kih) antigen binding molecules to 4-1BB expressing activated human CD4 and CD8 T cells from human PBMCs, respectively (see Example 7.1). Cells were gated on CD4 and CD8, and the binding curves were expressed by the mean fluorescent intensity of the secondary antibody against human Fc.

[0099] FIG. 17 shows the binding of CD19-targeted split trimeric 4-1BBL fusion molecules to CD19-expressing B lymphoma cell line (Example 7.2). The binding curves of the tested compounds (CD19-targeted split trimeric 4-1BBL Fc (kih) antigen binding molecules and untargeted Control D) to WSU-DLCL2 cells were expressed by the mean fluorescent intensity of the secondary antibody against human Fc.

[0100] FIG. 18 shows a scheme that illustrates the general principal of the NFkB activity assay described in Example 7.3 using a reporter cell line and CD19 expressing tumor cell lines. Shown is the activation assay set up with human 4-1BB expressing HeLa reporter cell line. A crosslinking of 4-1BB expressed on the reporter cells induces NFκB activation and NFκB-mediated Luciferase expression. After lysis of the cells Luciferase can catalyze the oxidation of Luciferin to Oxyluciferin. This chemical reaction correlates positively with the strength of NFκB-mediated luciferase expression and can be measured by the strength of light emission (units of released light).

[0101] FIGS. 19A to 19D show the NFκB-activation of luciferase in the 4-1BB expressing reporter cell line in the presence of CD19 expressing tumor cell lines and CD19-targeted split trimeric 4-1BBL Fc (kih) fusion antigen binding molecules as measured with the assay described in Example 7.3. Different test compounds containing either the anti-human CD19-binder clone 8B8-018 (construct 3.3 and 3.11) or the anti-human CD19 binder clone 8B8-2B11 (construct 4.1 and 4.11) were incubated at different concentrations (shown as nM on the x-axis) with 4-1BB expressing reporter cell line and no CD19-expressing cells (FIG. 19A) or CD19-expressing tumor cell lines OCI-Ly18, Nalm6 and SU-DHL-8 (FIG. 19B, FIG. 19C and FIG. 19D, respectively) at a E:T ratio 1:5 for 6 hours. The monovalent CD19-targeted split trimeric 4-1BBL Fc (kih) fusion antigen binding molecules (Constructs 3.11 and 4.11) could induce a nice Luciferase activity measured by the units of released light (URL) measured for 0.5s/well (shown on the y-axis) similar to the positive CD19-targeted control molecules Constructs 3.4 and 4.1 (as described in Example 1.11). The non-CD19-targeted control molecules Control F and D induce no Luciferase activity. All values were baseline corrected by substracting the blank control (no construct added or control added).

[0102] FIG. 20 shows IFNγ release in activated PBMCs via agonistic CD3 antibody in combination with CD19-targeted split trimeric 4-1BBL fusion molecules. IFN-γ releases were measured by ELISA in the culture supernatant of human PBMCs in the presence of different targeted- or untargeted-CD19-targeted split trimeric 4-1BBL Fc (kih) antigen binding molecules.

### DETAILED DESCRIPTION OF THE INVENTION

[0103] Definitions

[0104] Unless defined otherwise, technical and scientific terms used herein have the same meaning as generally used in the art to which this invention belongs. For purposes of interpreting this specification, the following definitions will apply and whenever appropriate, terms used in the singular will also include the plural and vice versa.

[0105] As used herein, the term “antigen binding molecule” refers in its broadest sense to a molecule that specifically binds an antigenic determinant. Examples of antigen binding molecules are antibodies, antibody fragments and scaffold antigen binding proteins.

[0106] As used herein, the term “moiety capable of specific binding to a target cell antigen” or “antigen binding domain capable of specific binding to a target cell antigen” refers to a polypeptide molecule that specifically binds to an antigenic determinant. In one aspect, the antigen binding moiety is able to activate signaling through its target cell antigen. In a particular aspect, the antigen binding moiety is able to direct the entity to which it is attached (e.g. the TNF family ligand trimer) to a target site, for example to a specific type of tumor cell or tumor stroma bearing the antigenic determinant. Moieties capable of specific binding to a target cell antigen include antibodies and fragments thereof as further defined herein. In addition, moieties capable of specific binding to a target cell antigen include scaffold antigen binding proteins as further defined herein, e.g. binding domains which are based on designed repeat proteins or designed repeat domains (see e.g. WO 2002/020565).

[0107] As used herein, the term “Fab domain capable of specific binding to a target cell antigen” refers to a Fab domain that specifically binds to an antigenic determinant. In one aspect, the antigen binding moiety is able to activate signaling through its target cell antigen. In a particular aspect, the antigen binding moiety is able to direct the entity to which it is attached (e.g. the TNF family ligand trimer) to a target site, for example to a specific type of tumor cell or tumor stroma bearing the antigenic determinant.

[0108] In relation to an antibody or Fab domain, the term “moiety capable of specific binding to a target cell antigen” refers to the part of the molecule that comprises the area which specifically binds to and is complementary to part or all of an antigen. A moiety capable of specific antigen binding may be provided, for example, by one or more antibody variable domains (also called antibody variable regions). Particularly, a moiety capable of specific antigen binding comprises an antibody light chain variable region (VL) and an antibody heavy chain variable region (VH).

[0109] The term “antibody” herein is used in the broadest sense and encompasses various antibody structures, including but not limited to monoclonal antibodies, polyclonal antibodies, monospecific and multispecific antibodies (e.g., bispecific antibodies), and antibody fragments so long as they exhibit the desired antigen-binding activity.

[0110] The term “monoclonal antibody” as used herein refers to an antibody obtained from a population of substantially homogeneous antibodies, i.e., the individual antibodies comprising the population are identical and/or bind the same epitope, except for possible variant antibodies, e.g. containing naturally occurring mutations or arising during production of a monoclonal antibody preparation, such variants generally being present in minor amounts. In contrast to polyclonal antibody preparations, which typically include different antibodies directed against different determinants (epitopes), each monoclonal antibody of a monoclonal antibody preparation is directed against a single determinant on an antigen.

[0111] The term “monospecific” antibody as used herein denotes an antibody that has one or more binding sites each of which bind to the same epitope of the same antigen. The term “bispecific” means that the antigen binding molecule is able to specifically bind to at least two distinct antigenic determinants. Typically, a bispecific antigen binding molecule comprises two antigen binding sites, each of which is specific for a different antigenic determinant. In certain embodiments the bispecific antigen binding molecule is capable of simultaneously binding two antigenic determinants, particularly two antigenic determinants expressed on two distinct cells.

[0112] The term “valent” as used within the current application denotes the presence of a specified number of binding sites in an antigen binding molecule. As such, the terms “bivalent”, “tetravalent”, and “hexavalent” denote the presence of two binding sites, four binding sites, and six binding sites, respectively, in an antigen binding molecule.

[0113] The term “monovalent to an antigen” as used within the current application denotes the presence of only one binding site for said antigen in the antigen binding molecule. The term “monovalent to a target cell antigen” as used within the current application denotes the presence of only one binding site for said target cell antigen in the antigen binding molecule.

[0114] The terms “full length antibody”, “intact antibody”, and “whole antibody” are used herein interchangeably to refer to an antibody having a structure substantially similar to a native antibody structure. “Native antibodies” refer to naturally occurring immunoglobulin molecules with varying structures. For example, native IgG-class antibodies are heterotetrameric glycoproteins of about 150,000 daltons, composed of two light chains and two heavy chains that are disulfide-bonded. From N- to C-terminus, each heavy chain has a variable region (VH), also called a variable heavy domain or a heavy chain variable domain, followed by three constant domains (CH1, CH2, and CH3), also called a heavy chain constant region. Similarly, from N- to C-terminus, each light chain has a variable region (VL), also called a variable light domain or a light chain variable domain, followed by a light chain constant domain (CL), also called a light chain constant region. The heavy chain of an antibody may be assigned to one of five types, called α (IgA), δ (IgD), ε (IgE), γ (IgG), or μ (IgM), some of which may be further divided into subtypes, e.g. γ1 (IgG1), γ2 (IgG2), γ3 (IgG3), γ4 (IgG4), α1 (IgA1) and α2 (IgA2). The light chain of an antibody may be assigned to one of two types, called kappa (κ) and lambda (λ), based on the amino acid sequence of its constant domain.

[0115] An “antibody fragment” refers to a molecule other than an intact antibody that comprises a portion of an intact antibody that binds the antigen to which the intact antibody binds.

[0116] Examples of antibody fragments include but are not limited to Fv, Fab, Fab′, Fab′-SH, F(ab′)₂; diabodies, triabodies, tetrabodies, cross-Fab fragments; linear antibodies; single-chain antibody molecules (e.g. scFv); and single domain antibodies. For a review of certain antibody fragments, see Hudson et al., Nat Med 9, 129-134 (2003). For a review of scFv fragments, see e.g. Plückthun, in The Pharmacology of Monoclonal Antibodies, vol. 113, Rosenburg and Moore eds., Springer-Verlag, New York, pp. 269-315 (1994); see also WO 93/16185; and U.S. Pat. Nos. 5,571,894 and 5,587,458. For discussion of Fab and F(ab′)2 fragments comprising salvage receptor binding epitope residues and having increased in vivo half-life, see U.S. Pat. No. 5,869,046. Diabodies are antibody fragments with two antigen-binding sites that may be bivalent or bispecific, see, for example, EP 404,097; WO 1993/01161; Hudson et al., Nat Med 9, 129-134 (2003); and Hollinger et al., Proc Natl Acad Sci USA 90, 6444-6448 (1993). Triabodies and tetrabodies are also described in Hudson et al., Nat Med 9, 129-134 (2003). Single-domain antibodies are antibody fragments comprising all or a portion of the heavy chain variable domain or all or a portion of the light chain variable domain of an antibody. In certain embodiments, a single-domain antibody is a human single-domain antibody (Domantis, Inc., Waltham, Mass.; see e.g. U.S. Pat. No. 6,248,516 B1). Antibody fragments can be made by various techniques, including but not limited to proteolytic digestion of an intact antibody as well as production by recombinant host cells (e.g. E. coli or phage), as described herein.

[0117] The term “Fab domain” as used herein denotes a Fab fragment or cross-Fab fragment as defined herein after.

[0118] Papain digestion of intact antibodies produces two identical antigen-binding fragments, called “Fab” fragments containing each the heavy- and light-chain variable domains and also the constant domain of the light chain and the first constant domain (CH1) of the heavy chain. As used herein, Thus, the term “Fab fragment” refers to an antibody fragment comprising a light chain fragment comprising a VL domain and a constant domain of a light chain (CL), and a VH domain and a first constant domain (CH1) of a heavy chain. Fab′ fragments differ from Fab fragments by the addition of a few residues at the carboxy terminus of the heavy chain CH1 domain including one or more cysteins from the antibody hinge region. Fab′-SH are Fab′ fragments in which the cysteine residue(s) of the constant domains bear a free thiol group. Pepsin treatment yields an F(ab′)2 fragment that has two antigen-combining sites (two Fab fragments) and a part of the Fc region.

[0119] The term “cross-Fab fragment” or “xFab fragment” or “crossover Fab fragment” refers to a Fab fragment, wherein either the variable regions or the constant regions of the heavy and light chain are exchanged. Two different chain compositions of a crossover Fab molecule are possible and comprised in the bispecific antibodies of the invention: On the one hand, the variable regions of the Fab heavy and light chain are exchanged, i.e. the crossover Fab molecule comprises a peptide chain composed of the light chain variable region (VL) and the heavy chain constant region (CH1), and a peptide chain composed of the heavy chain variable region (VH) and the light chain constant region (CL). This crossover Fab molecule is also referred to as CrossFab_{(VLVH)}. On the other hand, when the constant regions of the Fab heavy and light chain are exchanged, the crossover Fab molecule comprises a peptide chain composed of the heavy chain variable region (VH) and the light chain constant region (CL), and a peptide chain composed of the light chain variable region (VL) and the heavy chain constant region (CH1). This crossover Fab molecule is also referred to as CrossFab_{(CLCH)}.

[0120] A “single chain Fab fragment” or “scFab” is a polypeptide consisting of an antibody heavy chain variable domain (VH), an antibody constant domain 1 (CH1), an antibody light chain variable domain (VL), an antibody light chain constant domain (CL) and a linker, wherein said antibody domains and said linker have one of the following orders in N-terminal to C-terminal direction: a) VH-CH1-linker-VL-CL, b) VL-CL-linker-VH-CH1, c) VH-CL-linker-VL-CH1 or d) VL-CH1-linker-VH-CL; and wherein said linker is a polypeptide of at least 30 amino acids, preferably between 32 and 50 amino acids. Said single chain Fab fragments are stabilized via the natural disulfide bond between the CL domain and the CH1 domain. In addition, these single chain Fab molecules might be further stabilized by generation of interchain disulfide bonds via insertion of cysteine residues (e.g. position 44 in the variable heavy chain and position 100 in the variable light chain according to Kabat numbering).

[0121] A “crossover single chain Fab fragment” or “x-scFab” is a is a polypeptide consisting of an antibody heavy chain variable domain (VH), an antibody constant domain 1 (CH1), an antibody light chain variable domain (VL), an antibody light chain constant domain (CL) and a linker, wherein said antibody domains and said linker have one of the following orders in N-terminal to C-terminal direction: a) VH-CL-linker-VL-CH1 and b) VL-CH1-linker-VH-CL; wherein VH and VL form together an antigen-binding site which binds specifically to an antigen and wherein said linker is a polypeptide of at least 30 amino acids. In addition, these x-scFab molecules might be further stabilized by generation of interchain disulfide bonds via insertion of cysteine residues (e.g. position 44 in the variable heavy chain and position 100 in the variable light chain according to Kabat numbering).

[0122] A “single-chain variable fragment (scFv)” is a fusion protein of the variable regions of the heavy (V_{H}) and light chains (V_{L}) of an antibody, connected with a short linker peptide of ten to about 25 amino acids. The linker is usually rich in glycine for flexibility, as well as serine or threonine for solubility, and can either connect the N-terminus of the V_{H} with the C-terminus of the V_{L}, or vice versa. This protein retains the specificity of the original antibody, despite removal of the constant regions and the introduction of the linker. scFv antibodies are, e.g. described in Houston, J. S., Methods in Enzymol. 203 (1991) 46-96). In addition, antibody fragments comprise single chain polypeptides having the characteristics of a VH domain, namely being able to assemble together with a VL domain, or of a VL domain, namely being able to assemble together with a VH domain to a functional antigen binding site and thereby providing the antigen binding property of full length antibodies.

[0123] “Scaffold antigen binding proteins” are known in the art, for example, fibronectin and designed ankyrin repeat proteins (DARPins) have been used as alternative scaffolds for antigen-binding domains, see, e.g., Gebauer and Skerra, Engineered protein scaffolds as next-generation antibody therapeutics. Curr Opin Chem Biol 13:245-255 (2009) and Stumpp et al., Darpins: A new generation of protein therapeutics. Drug Discovery Today 13: 695-701 (2008). In one aspect of the invention, a scaffold antigen binding protein is selected from the group consisting of CTLA-4 (Evibody), Lipocalins (Anticalin), a Protein A-derived molecule such as Z-domain of Protein A (Affibody), an A-domain (Avimer/Maxibody), a serum transferrin (trans-body); a designed ankyrin repeat protein (DARPin), a variable domain of antibody light chain or heavy chain (single-domain antibody, sdAb), a variable domain of antibody heavy chain (nanobody, aVH), V_{NAR} fragments, a fibronectin (AdNectin), a C-type lectin domain (Tetranectin); a variable domain of a new antigen receptor beta-lactamase (V_{NAR} fragments), a human gamma-crystallin or ubiquitin (Affilin molecules); a kunitz type domain of human protease inhibitors, microbodies such as the proteins from the knottin family, peptide aptamers and fibronectin (adnectin).

[0124] An “antigen binding molecule that binds to the same epitope” as a reference molecule refers to an antigen binding molecule that blocks binding of the reference molecule to its antigen in a competition assay by 50% or more, and conversely, the reference molecule blocks binding of the antigen binding molecule to its antigen in a competition assay by 50% or more.

[0125] The term “antigen binding domain” refers to the part of an antigen binding molecule that comprises the area which specifically binds to and is complementary to part or all of an antigen. Where an antigen is large, an antigen binding molecule may only bind to a particular part of the antigen, which part is termed an epitope. An antigen binding domain may be provided by, for example, one or more variable domains (also called variable regions). Preferably, an antigen binding domain comprises an antibody light chain variable region (VL) and an antibody heavy chain variable region (VH).

[0126] As used herein, the term “antigenic determinant” is synonymous with “antigen” and “epitope,” and refers to a site (e.g. a contiguous stretch of amino acids or a conformational configuration made up of different regions of non-contiguous amino acids) on a polypeptide macromolecule to which an antigen binding moiety binds, forming an antigen binding moiety-antigen complex. Useful antigenic determinants can be found, for example, on the surfaces of tumor cells, on the surfaces of virus-infected cells, on the surfaces of other diseased cells, on the surface of immune cells, free in blood serum, and/or in the extracellular matrix (ECM). The proteins useful as antigens herein can be any native form the proteins from any vertebrate source, including mammals such as primates (e.g. humans) and rodents (e.g. mice and rats), unless otherwise indicated. In a particular embodiment the antigen is a human protein. Where reference is made to a specific protein herein, the term encompasses the “full-length”, unprocessed protein as well as any form of the protein that results from processing in the cell. The term also encompasses naturally occurring variants of the protein, e.g. splice variants or allelic variants.

[0127] By “specific binding” is meant that the binding is selective for the antigen and can be discriminated from unwanted or non-specific interactions. The ability of an antigen binding molecule to bind to a specific antigen can be measured either through an enzyme-linked immunosorbent assay (ELISA) or other techniques familiar to one of skill in the art, e.g. Surface Plasmon Resonance (SPR) technique (analyzed on a BIAcore instrument) (Liljeblad et al., Glyco J 17, 323-329 (2000)), and traditional binding assays (Heeley, Endocr Res 28, 217-229 (2002)). In one embodiment, the extent of binding of an antigen binding molecule to an unrelated protein is less than about 10% of the binding of the antigen binding molecule to the antigen as measured, e.g. by SPR. In certain embodiments, an molecule that binds to the antigen has a dissociation constant (Kd) of ≤1 μM, ≤100 nM, ≤10 nM, ≤1 nM, ≤0.1 nM, ≤0.01 nM, or ≤0.001 nM (e.g. 10⁻⁸ M or less, e.g. from 10⁻⁸ M to 10⁻¹³ M, e.g. from 10⁻⁹ M to 10⁻¹³ M).

[0128] “Affinity” or “binding affinity” refers to the strength of the sum total of non-covalent interactions between a single binding site of a molecule (e.g. an antibody) and its binding partner (e.g. an antigen). Unless indicated otherwise, as used herein, “binding affinity” refers to intrinsic binding affinity which reflects a 1:1 interaction between members of a binding pair (e.g. antibody and antigen). The affinity of a molecule X for its partner Y can generally be represented by the dissociation constant (Kd), which is the ratio of dissociation and association rate constants (koff and kon, respectively). Thus, equivalent affinities may comprise different rate constants, as long as the ratio of the rate constants remains the same. Affinity can be measured by common methods known in the art, including those described herein. A particular method for measuring affinity is Surface Plasmon Resonance (SPR).

[0129] A “target cell antigen” as used herein refers to an antigenic determinant presented on the surface of a target cell, for example a cell in a tumor such as a cancer cell or a cell of the tumor stroma. In certain embodiments, the target cell antigen is an antigen on the surface of a tumor cell. In one embodiment, target cell antigen is selected from the group consisting of Fibroblast Activation Protein (FAP), Carcinoembryonic Antigen (CEA), Melanoma-associated Chondroitin Sulfate Proteoglycan (MCSP), Epidermal Growth Factor Receptor (EGFR), CD19, CD20 and CD33. In particular, the target cell antigen is Fibroblast Activation Protein (FAP).

[0130] The term “Fibroblast activation protein (FAP)”, also known as Prolyl endopeptidase FAP or Seprase (EC 3.4.21), refers to any native FAP from any vertebrate source, including mammals such as primates (e.g. humans) non-human primates (e.g. cynomolgus monkeys) and rodents (e.g. mice and rats), unless otherwise indicated. The term encompasses “full-length,” unprocessed FAP as well as any form of FAP which results from processing in the cell. The term also encompasses naturally occurring variants of FAP, e.g., splice variants or allelic variants. In one embodiment, the antigen binding molecule of the invention is capable of specific binding to human, mouse and/or cynomolgus FAP. The amino acid sequence of human FAP is shown in UniProt (www.uniprot.org) accession no. Q12884 (version 149, SEQ ID NO:53), or NCBI (www.ncbi.nlm.nih.gov/) RefSeq NP_004451.2. The extracellular domain (ECD) of human FAP extends from amino acid position 26 to 760. The amino acid and nucleotide sequences of a His-tagged human FAP ECD is shown in SEQ ID NOs 54 and 55, respectively. The amino acid sequence of mouse FAP is shown in UniProt accession no. P97321 (version 126, SEQ ID NO:56), or NCBI RefSeq NP_032012.1. The extracellular domain (ECD) of mouse FAP extends from amino acid position 26 to 761. SEQ ID NOs 57 and 58 show the amino acid and nucleotide sequences, respectively, of a His-tagged mouse FAP ECD. SEQ ID NOs 59 and 60 show the amino acid and nucleotide sequences, respectively, of a His-tagged cynomolgus FAP ECD. Preferably, an anti-FAP binding molecule of the invention binds to the extracellular domain of FAP. Exemplary anti-FAP binding molecules are described in International Patent Application No. WO 2012/020006 A2.

[0131] The term “Carcinoembroynic antigen (CEA)”, also known as Carcinoembryonic antigen-related cell adhesion molecule 5 (CEACAMS), refers to any native CEA from any vertebrate source, including mammals such as primates (e.g. humans) non-human primates (e.g. cynomolgus monkeys) and rodents (e.g. mice and rats), unless otherwise indicated. The amino acid sequence of human CEA is shown in UniProt accession no. P06731 (version 151, SEQ ID NO:61). CEA has long been identified as a tumor-associated antigen (Gold and Freedman, J Exp Med., 121:439-462, 1965; Berinstein N. L., J Clin Oncol., 20:2197-2207, 2002). Originally classified as a protein expressed only in fetal tissue, CEA has now been identified in several normal adult tissues. These tissues are primarily epithelial in origin, including cells of the gastrointestinal, respiratory, and urogential tracts, and cells of colon, cervix, sweat glands, and prostate (Nap et al., Tumour Biol., 9(2-3):145-53, 1988; Nap et al., Cancer Res., 52(8):2329-23339, 1992). Tumors of epithelial origin, as well as their metastases, contain CEA as a tumor associated antigen. While the presence of CEA itself does not indicate transformation to a cancerous cell, the distribution of CEA is indicative. In normal tissue, CEA is generally expressed on the apical surface of the cell (Hammarström S., Semin Cancer Biol. 9(2):67-81 (1999)), making it inaccessible to antibody in the blood stream. In contrast to normal tissue, CEA tends to be expressed over the entire surface of cancerous cells (Hammarstrom S., Semin Cancer Biol. 9(2):67-81 (1999)). This change of expression pattern makes CEA accessible to antibody binding in cancerous cells. In addition, CEA expression increases in cancerous cells. Furthermore, increased CEA expression promotes increased intercellular adhesions, which may lead to metastasis (Marshall J., Semin Oncol., 30(a Suppl. 8):30-6, 2003). The prevalence of CEA expression in various tumor entities is generally very high. In concordance with published data, own analyses performed in tissue samples confirmed its high prevalence, with approximately 95% in colorectal carcinoma (CRC), 90% in pancreatic cancer, 80% in gastric cancer, 60% in non-small cell lung cancer (NSCLC, where it is co-expressed with HER3), and 40% in breast cancer; low expression was found in small cell lung cancer and glioblastoma.

[0132] CEA is readily cleaved from the cell surface and shed into the blood stream from tumors, either directly or via the lymphatics. Because of this property, the level of serum CEA has been used as a clinical marker for diagnosis of cancers and screening for recurrence of cancers, particularly colorectal cancer (Goldenberg D M., The International Journal of Biological Markers, 7:183-188, 1992; Chau I., et al., J Clin Oncol., 22:1420-1429, 2004; Flamini et al., Clin Cancer Res; 12(23):6985-6988, 2006).

[0133] The term “Melanoma-associated Chondroitin Sulfate Proteoglycan (MCSP)”, also known as Chondroitin Sulfate Proteoglycan 4 (CSPG4) refers to any native MCSP from any vertebrate source, including mammals such as primates (e.g. humans) non-human primates (e.g. cynomolgus monkeys) and rodents (e.g. mice and rats), unless otherwise indicated. The amino acid sequence of human MCSP is shown in UniProt accession no. Q6UVK1 (version 103, SEQ ID NO:62). The term “Epidermal Growth Factor Receptor (EGFR)”, also named Proto-oncogene c-ErbB-1 or Receptor tyrosine-protein kinase erbB-1, refers to any native EGFR from any vertebrate source, including mammals such as primates (e.g. humans) non-human primates (e.g. cynomolgus monkeys) and rodents (e.g. mice and rats), unless otherwise indicated. The amino acid sequence of human EGFR is shown in UniProt accession no. P00533 (version 211, SEQ ID NO:63).

[0134] The term “CD19” refers to B-lymphocyte antigen CD19, also known as B-lymphocyte surface antigen B4 or T-cell surface antigen Leu-12 and includes any native CD19 from any vertebrate source, including mammals such as primates (e.g. humans) non-human primates (e.g. cynomolgus monkeys) and rodents (e.g. mice and rats), unless otherwise indicated. The amino acid sequence of human CD19 is shown in Uniprot accession no. P15391 (version 160, SEQ ID NO:64). The term encompasses “full-length” unprocessed human CD19 as well as any form of human CD19 that results from processing in the cell as long as the antibody as reported herein binds thereto. CD19 is a structurally distinct cell surface receptor expressed on the surface of human B cells, including, but not limited to, pre-B cells, B cells in early development {i.e., immature B cells), mature B cells through terminal differentiation into plasma cells, and malignant B cells. CD19 is expressed by most pre-B acute lymphoblastic leukemias (ALL), non-Hodgkin's lymphomas, B cell chronic lymphocytic leukemias (CLL), pro-lymphocytic leukemias, hairy cell leukemias, common acute lymphocytic leukemias, and some Null-acute lymphoblastic leukemias. The expression of CD19 on plasma cells further suggests it may be expressed on differentiated B cell tumors such as multiple myeloma. Therefore, the CD19 antigen is a target for immunotherapy in the treatment of non-Hodgkin's lymphoma, chronic lymphocytic leukemia and/or acute lymphoblastic leukemia.

[0135] “CD20” refers to B-lymphocyte antigen CD20, also known as membrane-spanning 4-domains subfamily A member 1 (MS4A1), B-lymphocyte surface antigen B1 or Leukocyte surface antigen Leu-16, and includes any native CD20 from any vertebrate source, including mammals such as primates (e.g. humans) non-human primates (e.g. cynomolgus monkeys) and rodents (e.g. mice and rats), unless otherwise indicated. The amino acid sequence of human CD20 is shown in Uniprot accession no. P11836 (version 149, SEQ ID NO:65). “CD33” refers to Myeloid cell surface antigen CD33, also known as SIGLEC3 or gp67, and includes any native CD33 from any vertebrate source, including mammals such as primates (e.g. humans) non-human primates (e.g. cynomolgus monkeys) and rodents (e.g. mice and rats), unless otherwise indicated. The amino acid sequence of human CD33 is shown in Uniprot accession no. P20138 (version 157, SEQ ID NO:66).

[0136] The term “variable region” or “variable domain” refers to the domain of an antibody heavy or light chain that is involved in binding the antigen binding molecule to antigen. The variable domains of the heavy chain and light chain (VH and VL, respectively) of a native antibody generally have similar structures, with each domain comprising four conserved framework regions (FRs) and three hypervariable regions (HVRs). See, e.g., Kindt et al., Kuby Immunology, 6th ed., W.H. Freeman and Co., page 91 (2007). A single VH or VL domain may be sufficient to confer antigen-binding specificity.

[0137] The term “hypervariable region” or “HVR,” as used herein refers to each of the regions of an antibody variable domain which are hypervariable in sequence and/or form structurally defined loops (“hypervariable loops”). Generally, native four-chain antibodies comprise six HVRs; three in the VH (H1, H2, H3), and three in the VL (L1, L2, L3). HVRs generally comprise amino acid residues from the hypervariable loops and/or from the “complementarity determining regions” (CDRs), the latter being of highest sequence variability and/or involved in antigen recognition. Exemplary hypervariable loops occur at amino acid residues 26-32 (L1), 50-52 (L2), 91-96 (L3), 26-32 (H1), 53-55 (H2), and 96-101 (H3). (Chothia and Lesk, J. Mol. Biol. 196:901-917 (1987).) Exemplary CDRs (CDR-L1, CDR-L2, CDR-L3, CDR-H1, CDR-H2, and CDR-H3) occur at amino acid residues 24-34 of L1, 50-56 of L2, 89-97 of L3, 31-35B of H1, 50-65 of H2, and 95-102 of H3. (Kabat et al., Sequences of Proteins of Immunological Interest, 5th Ed. Public Health Service, National Institutes of Health, Bethesda, Md. (1991).) Hypervariable regions (HVRs) are also referred to as complementarity determining regions (CDRs), and these terms are used herein interchangeably in reference to portions of the variable region that form the antigen binding regions. This particular region has been described by Kabat et al., U.S. Dept. of Health and Human Services, “Sequences of Proteins of Immunological Interest” (1983) and by Chothia et al., J. Mol. Biol. 196:901-917 (1987), where the definitions include overlapping or subsets of amino acid residues when compared against each other. Nevertheless, application of either definition to refer to a CDR of an antibody or variants thereof is intended to be within the scope of the term as defined and used herein. The appropriate amino acid residues which encompass the CDRs as defined by each of the above cited references are set forth below in Table A as a comparison. The exact residue numbers which encompass a particular CDR will vary depending on the sequence and size of the CDR. Those skilled in the art can routinely determine which residues comprise a particular CDR given the variable region amino acid sequence of the antibody.

TABLE A
CDR Definitions¹

| CDR | Kabat | Chothia | AbM² |
|---|---|---|---|
| V_{H} CDR1 | 31-35 | 26-32 | 26-35 |
| V_{H} CDR2 | 50-65 | 52-58 | 50-58 |
| V_{H} CDR3 | 95-102 | 95-102 | 95-102 |
| V_{L} CDR1 | 24-34 | 26-32 | 24-34 |
| V_{L} CDR2 | 50-56 | 50-52 | 50-56 |
| V_{L} CDR3 | 89-97 | 91-96 | 89-97 |

¹Numbering of all CDR definitions in Table A is according to the numbering conventions set forth by Kabat et al. (see below).
²“AbM” with a lowercase “b” as used in Table A refers to the CDRs as defined by Oxford Molecular's “AbM” antibody modeling software.

[0138] Kabat et al. also defined a numbering system for variable region sequences that is applicable to any antibody. One of ordinary skill in the art can unambiguously assign this system of “Kabat numbering” to any variable region sequence, without reliance on any experimental data beyond the sequence itself. As used herein, “Kabat numbering” refers to the numbering system set forth by Kabat et al., U.S. Dept. of Health and Human Services, “Sequence of Proteins of Immunological Interest” (1983). Unless otherwise specified, references to the numbering of specific amino acid residue positions in an antibody variable region are according to the Kabat numbering system.

[0139] With the exception of CDR1 in VH, CDRs generally comprise the amino acid residues that form the hypervariable loops. CDRs also comprise “specificity determining residues,” or “SDRs,” which are residues that contact antigen. SDRs are contained within regions of the CDRs called abbreviated-CDRs, or a-CDRs. Exemplary a-CDRs (a-CDR-L1, a-CDR-L2, a-CDR-L3, a-CDR-H1, a-CDR-H2, and a-CDR-H3) occur at amino acid residues 31-34 of L1, 50-55 of L2, 89-96 of L3, 31-35B of H1, 50-58 of H2, and 95-102 of H3. (See Almagro and Fransson, Front. Biosci. 13:1619-1633 (2008).) Unless otherwise indicated, HVR residues and other residues in the variable domain (e.g., FR residues) are numbered herein according to Kabat et al., supra.

[0140] As used herein, the term “affinity matured” in the context of antigen binding molecules (e.g., antibodies) refers to an antigen binding molecule that is derived from a reference antigen binding molecule, e.g., by mutation, binds to the same antigen, preferably binds to the same epitope, as the reference antibody; and has a higher affinity for the antigen than that of the reference antigen binding molecule. Affinity maturation generally involves modification of one or more amino acid residues in one or more CDRs of the antigen binding molecule. Typically, the affinity matured antigen binding molecule binds to the same epitope as the initial reference antigen binding molecule.

[0141] “Framework” or “FR” refers to variable domain residues other than hypervariable region (HVR) residues. The FR of a variable domain generally consists of four FR domains: FR1, FR2, FR3, and FR4. Accordingly, the HVR and FR sequences generally appear in the following sequence in VH (or VL): FR1-H1(L1)-FR2-H2(L2)-FR3-H3(L3)-FR4.

[0142] An “acceptor human framework” for the purposes herein is a framework comprising the amino acid sequence of a light chain variable domain (VL) framework or a heavy chain variable domain (VH) framework derived from a human immunoglobulin framework or a human consensus framework, as defined below. An acceptor human framework “derived from” a human immunoglobulin framework or a human consensus framework may comprise the same amino acid sequence thereof, or it may contain amino acid sequence changes. In some embodiments, the number of amino acid changes are 10 or less, 9 or less, 8 or less, 7 or less, 6 or less, 5 or less, 4 or less, 3 or less, or 2 or less. In some embodiments, the VL acceptor human framework is identical in sequence to the VL human immunoglobulin framework sequence or human consensus framework sequence.

[0143] The term “chimeric” antibody refers to an antibody in which a portion of the heavy and/or light chain is derived from a particular source or species, while the remainder of the heavy and/or light chain is derived from a different source or species.

[0144] The “class” of an antibody refers to the type of constant domain or constant region possessed by its heavy chain. There are five major classes of antibodies: IgA, IgD, IgE, IgG, and IgM, and several of these may be further divided into subclasses (isotypes), e.g. IgG₁, IgG₂, IgG₃, IgG₄, IgA₁, and IgA₂. The heavy chain constant domains that correspond to the different classes of immunoglobulins are called α, δ, ε, γ, and μ respectively.

[0145] A “humanized” antibody refers to a chimeric antibody comprising amino acid residues from non-human HVRs and amino acid residues from human FRs. In certain embodiments, a humanized antibody will comprise substantially all of at least one, and typically two, variable domains, in which all or substantially all of the HVRs (e.g., CDRs) correspond to those of a non-human antibody, and all or substantially all of the FRs correspond to those of a human antibody. A humanized antibody optionally may comprise at least a portion of an antibody constant region derived from a human antibody. A “humanized form” of an antibody, e.g., a non-human antibody, refers to an antibody that has undergone humanization. Other forms of “humanized antibodies” encompassed by the present invention are those in which the constant region has been additionally modified or changed from that of the original antibody to generate the properties according to the invention, especially in regard to C1q binding and/or Fc receptor (FcR) binding.

[0146] A “human” antibody is one which possesses an amino acid sequence which corresponds to that of an antibody produced by a human or a human cell or derived from a non-human source that utilizes human antibody repertoires or other human antibody-encoding sequences. This definition of a human antibody specifically excludes a humanized antibody comprising non-human antigen-binding residues.

[0147] The term “Fc domain” or “Fe region” herein is used to define a C-terminal region of an antibody heavy chain that contains at least a portion of the constant region. The term includes native sequence Fc regions and variant Fc regions. An IgG Fc region comprises an IgG CH2 and an IgG CH3 domain. The “CH2 domain” of a human IgG Fc region usually extends from an amino acid residue at about position 231 to an amino acid residue at about position 340. In one embodiment, a carbohydrate chain is attached to the CH2 domain. The CH2 domain herein may be a native sequence CH2 domain or variant CH2 domain. The “CH3 domain” comprises the stretch of residues C-terminal to a CH2 domain in an Fc region (i.e. from an amino acid residue at about position 341 to an amino acid residue at about position 447 of an IgG). The CH3 region herein may be a native sequence CH3 domain or a variant CH3 domain (e.g. a CH3 domain with an introduced “protuberance” (“knob”) in one chain thereof and a corresponding introduced “cavity” (“hole”) in the other chain thereof; see U.S. Pat. No. 5,821,333, expressly incorporated herein by reference). Such variant CH3 domains may be used to promote heterodimerization of two non-identical antibody heavy chains as herein described. In one embodiment, a human IgG heavy chain Fc region extends from Cys226, or from Pro230, to the carboxyl-terminus of the heavy chain. However, the C-terminal lysine (Lys447) of the Fc region may or may not be present. Unless otherwise specified herein, numbering of amino acid residues in the Fc region or constant region is according to the EU numbering system, also called the EU index, as described in Kabat et al., Sequences of Proteins of Immunological Interest, 5th Ed. Public Health Service, National Institutes of Health, Bethesda, Md., 1991.

[0148] The “knob-into-hole” technology is described e.g. in U.S. Pat. Nos. 5,731,168; 7,695,936; Ridgway et al., Prot Eng 9, 617-621 (1996) and Carter, J Immunol Meth 248, 7-15 (2001). Generally, the method involves introducing a protuberance (“knob”) at the interface of a first polypeptide and a corresponding cavity (“hole”) in the interface of a second polypeptide, such that the protuberance can be positioned in the cavity so as to promote heterodimer formation and hinder homodimer formation. Protuberances are constructed by replacing small amino acid side chains from the interface of the first polypeptide with larger side chains (e.g. tyrosine or tryptophan). Compensatory cavities of identical or similar size to the protuberances are created in the interface of the second polypeptide by replacing large amino acid side chains with smaller ones (e.g. alanine or threonine). The protuberance and cavity can be made by altering the nucleic acid encoding the polypeptides, e.g. by site-specific mutagenesis, or by peptide synthesis. In a specific embodiment a knob modification comprises the amino acid substitution T366W in one of the two subunits of the Fc domain, and the hole modification comprises the amino acid substitutions T366S, L368A and Y407V in the other one of the two subunits of the Fc domain. In a further specific embodiment, the subunit of the Fc domain comprising the knob modification additionally comprises the amino acid substitution S354C, and the subunit of the Fc domain comprising the hole modification additionally comprises the amino acid substitution Y349C. Introduction of these two cysteine residues results in the formation of a disulfide bridge between the two subunits of the Fc region, thus further stabilizing the dimer (Carter, J Immunol Methods 248, 7-15 (2001)). The numbering is according to EU index of Kabat et al, Sequences of Proteins of Immunological Interest, 5th Ed. Public Health Service, National Institutes of Health, Bethesda, Md., 1991.

[0149] A “region equivalent to the Fc region of an immunoglobulin” is intended to include naturally occurring allelic variants of the Fc region of an immunoglobulin as well as variants having alterations which produce substitutions, additions, or deletions but which do not decrease substantially the ability of the immunoglobulin to mediate effector functions (such as antibody-dependent cellular cytotoxicity). For example, one or more amino acids can be deleted from the N-terminus or C-terminus of the Fc region of an immunoglobulin without substantial loss of biological function. Such variants can be selected according to general rules known in the art so as to have minimal effect on activity (see, e.g., Bowie, J. U. et al., Science 247:1306-10 (1990)).

[0150] The term “effector functions” refers to those biological activities attributable to the Fc region of an antibody, which vary with the antibody isotype. Examples of antibody effector functions include: C1q binding and complement dependent cytotoxicity (CDC), Fc receptor binding, antibody-dependent cell-mediated cytotoxicity (ADCC), antibody-dependent cellular phagocytosis (ADCP), cytokine secretion, immune complex-mediated antigen uptake by antigen presenting cells, down regulation of cell surface receptors (e.g. B cell receptor), and B cell activation.

[0151] An “activating Fc receptor” is an Fc receptor that following engagement by an Fc region of an antibody elicits signaling events that stimulate the receptor-bearing cell to perform effector functions. Activating Fc receptors include FcγRIIIa (CD16a), FcγRI (CD64), FcγRIIa (CD32), and FcαRI (CD89). A particular activating Fc receptor is human FcγRIIIa (see UniProt accession no. P08637, version 141).

[0152] The term “TNF ligand family member” or “TNF family ligand” refers to a proinflammatory cytokine. Cytokines in general, and in particular the members of the TNF ligand family, play a crucial role in the stimulation and coordination of the immune system. At present, nineteen cyctokines have been identified as members of the TNF (tumour necrosis factor) ligand superfamily on the basis of sequence, functional, and structural similarities. All these ligands are type II transmembrane proteins with a C-terminal extracellular domain (ectodomain), N-terminal intracellular domain and a single transmembrane domain. The C-terminal extracellular domain, known as TNF homology domain (THD), has 20-30% amino acid identity between the superfamily members and is responsible for binding to the receptor. The TNF ectodomain is also responsible for the TNF ligands to form trimeric complexes that are recognized by their specific receptors.

[0153] Members of the TNF ligand family are selected from the group consisting of Lymphotoxin α (also known as LTA or TNFSF1), TNF (also known as TNFSF2), LTβ (also known as TNFSF3), OX40L (also known as TNFSF4), CD40L (also known as CD154 or TNFSFS), FasL (also known as CD95L, CD178 or TNFSF6), CD27L (also known as CD70 or TNFSF7), CD30L (also known as CD153 or TNFSF8), 4-1BBL (also known as TNFSF9), TRAIL (also known as APO2L, CD253 or TNFSF10), RANKL (also known as CD254 or TNFSF11), TWEAK (also known as TNFSF12), APRIL (also known as CD256 or TNFSF13), BAFF (also known as CD257 or TNFSF13B), LIGHT (also known as CD258 or TNFSF14), TL1A (also known as VEGI or TNFSF15), GITRL (also known as TNFSF18), EDA-A1 (also known as ectodysplasin A1) and EDA-A2 (also known as ectodysplasin A2). The term refers to any native TNF family ligand from any vertebrate source, including mammals such as primates (e.g. humans), non-human primates (e.g. cynomolgus monkeys) and rodents (e.g. mice and rats), unless otherwise indicated. In specific embodiments of the invention, the TNF ligand family member is selected from the group consisting of OX40L, FasL, CD27L, TRAIL, 4-1BBL, CD40L and GITRL. In a particular embodiment, the TNF ligand family member is selected from 4-1BBL and OX40L.

[0154] Further information, in particular sequences, of the TNF ligand family members may be obtained from publically accessible databases such as Uniprot (www.uniprot.org). For instance, the human TNF ligands have the following amino acid sequences: human Lymphotoxin a (UniProt accession no. P01374, SEQ ID NO:67), human TNF (UniProt accession no. P01375, SEQ ID NO:68), human Lymphotoxin β (UniProt accession no. Q06643, SEQ ID NO:69), human OX40L (UniProt accession no. P23510, SEQ ID NO:70), human CD40L (UniProt accession no. P29965, SEQ ID NO:71), human FasL (UniProt accession no. P48023, SEQ ID NO:72), human CD27L (UniProt accession no. P32970, SEQ ID NO:73), human CD30L (UniProt accession no. P32971, SEQ ID NO:74), 4-1BBL (UniProt accession no. P41273, SEQ ID NO:75), TRAIL (UniProt accession no. P50591, SEQ ID NO:76), RANKL (UniProt accession no. 014788, SEQ ID NO:77), TWEAK (UniProt accession no. 043508, SEQ ID NO:78), APRIL (UniProt accession no. 075888, SEQ ID NO:79), BAFF (UniProt accession no. Q9Y275, SEQ ID NO:80), LIGHT (UniProt accession no. 043557, SEQ ID NO:81), TL1A (UniProt accession no. 095150, SEQ ID NO:82), GITRL (UniProt accession no. Q9UNG2, SEQ ID NO:83) and ectodysplasin A (UniProt accession no. Q92838, SEQ ID NO:84).

[0155] An “ectodomain” is the domain of a membrane protein that extends into the extracellular space (i.e. the space outside the target cell). Ectodomains are usually the parts of proteins that initiate contact with surfaces, which leads to signal transduction. The ectodomain of TNF ligand family member as defined herein thus refers to the part of the TNF ligand protein that extends into the extracellular space (the extracellular domain), but also includes shorter parts or fragments thereof that are responsible for the trimerization and for the binding to the corresponding TNF receptor. The term “ectodomain of a TNF ligand family member or a fragment thereof” thus refers to the extracellular domain of the TNF ligand family member that forms the extracellular domain or to parts thereof that are still able to bind to the receptor (receptor binding domain).

[0156] The term “costimulatory TNF ligand family member” or “costimulatory TNF family ligand” refers to a subgroup of TNF ligand family members, which are able to costimulate proliferation and cytokine production of T-cells. These TNF family ligands can costimulate TCR signals upon interaction with their corresponding TNF receptors and the interaction with their receptors leads to recruitment of TNFR-associated factors (TRAF), which initiate signalling cascades that result in T-cell activation. Costimulatory TNF family ligands are selected from the group consisting of 4-1BBL, OX40L, GITRL, CD70, CD30L and LIGHT, more particularly the costimulatory TNF ligand family member is selected from 4-1BBL and OX40L.

[0157] As described herein before, 4-1BBL is a type II transmembrane protein and one member of the TNF ligand family. Complete or full length 4-1BBL having the amino acid sequence of SEQ ID NO:42 has been described to form trimers on the surface of cells. The formation of trimers is enabled by specific motives of the ectodomain of 4-1BBL. Said motives are designated herein as “trimerization region”. The amino acids 50-254 of the human 4-1BBL sequence (SEQ ID NO:85) form the extracellular domain of 4-1BBL, but even fragments thereof are able to form the trimers. In specific embodiments of the invention, the term “ectodomain of 4-1BBL or a fragment thereof” refers to a polypeptide having an amino acid sequence selected from SEQ ID NO:4 (amino acids 52-254 of human 4-1BBL), SEQ ID NO:1 (amino acids 71-254 of human 4-1BBL), SEQ ID NO:3 (amino acids 80-254 of human 4-1BBL) and SEQ ID NO:2 (amino acids 85-254 of human 4-1BBL) or a polypeptide having an amino acid sequence selected from SEQ ID NO:5 (amino acids 71-248 of human 4-1BBL), SEQ ID NO:8 (amino acids 52-248 of human 4-1BBL), SEQ ID NO:7 (amino acids 80-248 of human 4-1BBL) and SEQ ID NO:6 (amino acids 85-248 of human 4-1BBL), but also other fragments of the ectodomain capable of trimerization are included herein.

[0158] As described herein before, OX40L is another type II transmembrane protein and a further member of the TNF ligand family. Complete or full length human OX40L has the amino acid sequence of SEQ ID NO:70. The amino acids 51-183 of the human OX40L sequence (SEQ ID NO:11) form the extracellular domain of OX40L, but even fragments thereof that are able to form the trimers. In specific embodiments of the invention, the term “ectodomain of OX40L or a fragment thereof” refers to a polypeptide having an amino acid sequence selected from SEQ ID NO:11 (amino acids 51-183 of human OX40L) or SEQ ID NO:12 (amino acids 52-183 of human OX40L), but also other fragments of the ectodomain capable of trimerization are included herein.

[0159] The term “peptide linker” refers to a peptide comprising one or more amino acids, typically about 2 to 20 amino acids. Peptide linkers are known in the art or are described herein. Suitable, non-immunogenic linker peptides are, for example, (G₄S)ₙ, (SG₄)ₙ or G₄(SG₄)ₙ peptide linkers, wherein “n” is generally a number between 1 and 10, typically between 1 and 4, in particular 2, i.e. the peptides selected from the group consisting of GGGGS (SEQ ID NO:86), GGGGSGGGGS (SEQ ID NO:87), SGGGGSGGGG (SEQ ID NO:88), (G₄S)₃ or GGGGSGGGGSGGGGS (SEQ ID NO:89), GGGGSGGGGSGGGG or G4(SG4)₂ (SEQ ID NO:90), and (G₄S)₄ or GGGGSGGGGSGGGGSGGGGS (SEQ ID NO:91), but also include the sequences GSPGSSSSGS (SEQ ID NO:92), GSGSGSGS (SEQ ID NO:93), GSGSGNGS (SEQ ID NO:94), GGSGSGSG (SEQ ID NO:95), GGSGSG (SEQ ID NO:96), GGSG (SEQ ID NO:97), GGSGNGSG (SEQ ID NO:98), GGNGSGSG (SEQ ID NO:99) and GGNGSG (SEQ ID NO:100). Peptide linkers of particular interest are (G4S)₁ or GGGGS (SEQ ID NO:86), (G₄S)₂ or GGGGSGGGGS (SEQ ID NO:87) and GSPGSSSSGS (SEQ ID NO:92), more particularly (G₄S)₂ or GGGGSGGGGS (SEQ ID NO:87).

[0160] The term “amino acid” as used within this application denotes the group of naturally occurring carboxy α-amino acids comprising alanine (three letter code: ala, one letter code: A), arginine (arg, R), asparagine (asn, N), aspartic acid (asp, D), cysteine (cys, C), glutamine (gln, Q), glutamic acid (glu, E), glycine (gly, G), histidine (his, H), isoleucine (ile, I), leucine (leu, L), lysine (lys, K), methionine (met, M), phenylalanine (phe, F), proline (pro, P), serine (ser, S), threonine (thr, T), tryptophan (trp, W), tyrosine (tyr, Y), and valine (val, V).

[0161] A “single chain fusion protein” as used herein refers to a single chain polypeptide composed of one or two ectodomains of said TNF ligand family member fused to a part of antigen binding moiety or Fc part. The fusion may occur by directly linking the N or C-terminal amino acid of the antigen binding moiety via a peptide linker to the C- or N-terminal amino acid of the ectodomain of said TNF ligand family member.

[0162] By “fused” or “connected” is meant that the components (e.g. a polypeptide and an ectodomain of said TNF ligand family member) are linked by peptide bonds, either directly or via one or more peptide linkers.

[0163] “Percent (%) amino acid sequence identity” with respect to a reference polypeptide (protein) sequence is defined as the percentage of amino acid residues in a candidate sequence that are identical with the amino acid residues in the reference polypeptide sequence, after aligning the sequences and introducing gaps, if necessary, to achieve the maximum percent sequence identity, and not considering any conservative substitutions as part of the sequence identity. Alignment for purposes of determining percent amino acid sequence identity can be achieved in various ways that are within the skill in the art, for instance, using publicly available computer software such as BLAST, BLAST-2, ALIGN. SAWI or Megalign (DNASTAR) software. Those skilled in the art can determine appropriate parameters for aligning sequences, including any algorithms needed to achieve maximal alignment over the full length of the sequences being compared. For purposes herein, however, % amino acid sequence identity values are generated using the sequence comparison computer program ALIGN-2. The ALIGN-2 sequence comparison computer program was authored by Genentech, Inc., and the source code has been filed with user documentation in the U.S. Copyright Office, Washington D.C., 20559, where it is registered under U.S. Copyright Registration No. TXU510087. The ALIGN-2 program is publicly available from Genentech, Inc., South San Francisco, Calif., or may be compiled from the source code. The ALIGN-2 program should be compiled for use on a UNIX operating system, including digital UNIX V4.0D. All sequence comparison parameters are set by the ALIGN-2 program and do not vary. In situations where ALIGN-2 is employed for amino acid sequence comparisons, the % amino acid sequence identity of a given amino acid sequence A to, with, or against a given amino acid sequence B (which can alternatively be phrased as a given amino acid sequence A that has or comprises a certain % amino acid sequence identity to, with, or against a given amino acid sequence B) is calculated as follows:

100 times the fraction X/Y

[0164] where X is the number of amino acid residues scored as identical matches by the sequence alignment program ALIGN-2 in that program's alignment of A and B, and where Y is the total number of amino acid residues in B. It will be appreciated that where the length of amino acid sequence A is not equal to the length of amino acid sequence B, the % amino acid sequence identity of A to B will not equal the % amino acid sequence identity of B to A. Unless specifically stated otherwise, all % amino acid sequence identity values used herein are obtained as described in the immediately preceding paragraph using the ALIGN-2 computer program.

[0165] In certain embodiments, amino acid sequence variants of the TNF ligand trimer-containing antigen binding molecules provided herein are contemplated. For example, it may be desirable to improve the binding affinity and/or other biological properties of the TNF ligand trimer-containing antigen binding molecules. Amino acid sequence variants of the TNF ligand trimer-containing antigen binding molecules may be prepared by introducing appropriate modifications into the nucleotide sequence encoding the molecules, or by peptide synthesis. Such modifications include, for example, deletions from, and/or insertions into and/or substitutions of residues within the amino acid sequences of the antibody. Any combination of deletion, insertion, and substitution can be made to arrive at the final construct, provided that the final construct possesses the desired characteristics, e.g., antigen-binding. Sites of interest for substitutional mutagenesis include the HVRs and Framework (FRs). Conservative substitutions are provided in Table B under the heading “Preferred Substitutions” and further described below in reference to amino acid side chain classes (1) to (6). Amino acid substitutions may be introduced into the molecule of interest and the products screened for a desired activity, e.g., retained/improved antigen binding, decreased immunogenicity, or improved ADCC or CDC.

TABLE B

| Original | Exemplary | Preferred |
|---|---|---|
| Residue | Substitutions | Substitutions |
| Ala (A) | Val; Leu; Ile | Val |
| Arg (R) | Lys; Gln; Asn | Lys |
| Asn (N) | Gln; His; Asp, Lys; Arg | Gln |
| Asp (D) | Glu; Asn | Glu |
| Cys (C) | Ser; Ala | Ser |
| Gln (Q) | Asn; Glu | Asn |
| Glu (E) | Asp; Gln | Asp |
| Gly (G) | Ala | Ala |
| His (H) | Asn; Gln; Lys; Arg | Arg |
| Ile (I) | Leu; Val; Met; Ala; Phe; Norleucine | Leu |
| Leu (L) | Norleucine; Ile; Val; Met; Ala; Phe | Ile |
| Lys (K) | Arg; Gln; Asn | Arg |
| Met (M) | Leu; Phe; Ile | Leu |
| Phe (F) | Trp; Leu; Val; Ile; Ala; Tyr | Tyr |
| Pro (P) | Ala | Ala |
| Ser (S) | Thr | Thr |
| Thr (T) | Val; Ser | Ser |
| Trp (W) | Tyr; Phe | Tyr |
| Tyr (Y) | Trp; Phe; Thr; Ser | Phe |
| Val (V) | Ile; Leu; Met; Phe; Ala; Norleucine | Leu |

[0166] Amino acids may be grouped according to common side-chain properties:
[0167] (1) hydrophobic: Norleucine, Met, Ala, Val, Leu, Ile;
[0168] (2) neutral hydrophilic: Cys, Ser, Thr, Asn, Gln;
[0169] (3) acidic: Asp, Glu;
[0170] (4) basic: His, Lys, Arg;
[0171] (5) residues that influence chain orientation: Gly, Pro;
[0172] (6) aromatic: Trp, Tyr, Phe.

[0173] Non-conservative substitutions will entail exchanging a member of one of these classes for another class.

[0174] The term “amino acid sequence variants” includes substantial variants wherein there are amino acid substitutions in one or more hypervariable region residues of a parent antigen binding molecule (e.g. a humanized or human antibody). Generally, the resulting variant(s) selected for further study will have modifications (e.g., improvements) in certain biological properties (e.g., increased affinity, reduced immunogenicity) relative to the parent antigen binding molecule and/or will have substantially retained certain biological properties of the parent antigen binding molecule. An exemplary substitutional variant is an affinity matured antibody, which may be conveniently generated, e.g., using phage display-based affinity maturation techniques such as those described herein. Briefly, one or more HVR residues are mutated and the variant antigen binding molecules displayed on phage and screened for a particular biological activity (e.g. binding affinity). In certain embodiments, substitutions, insertions, or deletions may occur within one or more HVRs so long as such alterations do not substantially reduce the ability of the antigen binding molecule to bind antigen. For example, conservative alterations (e.g., conservative substitutions as provided herein) that do not substantially reduce binding affinity may be made in HVRs. A useful method for identification of residues or regions of an antibody that may be targeted for mutagenesis is called “alanine scanning mutagenesis” as described by Cunningham and Wells (1989) Science, 244:1081-1085. In this method, a residue or group of target residues (e.g., charged residues such as Arg, Asp, His, Lys, and Glu) are identified and replaced by a neutral or negatively charged amino acid (e.g., alanine or polyalanine) to determine whether the interaction of the antibody with antigen is affected. Further substitutions may be introduced at the amino acid locations demonstrating functional sensitivity to the initial substitutions. Alternatively, or additionally, a crystal structure of an antigen-antigen binding molecule complex to identify contact points between the antibody and antigen. Such contact residues and neighboring residues may be targeted or eliminated as candidates for substitution. Variants may be screened to determine whether they contain the desired properties.

[0175] Amino acid sequence insertions include amino- and/or carboxyl-terminal fusions ranging in length from one residue to polypeptides containing a hundred or more residues, as well as intrasequence insertions of single or multiple amino acid residues. Examples of terminal insertions include TNF family ligand trimer-containing antigen binding molecule with an N-terminal methionyl residue. Other insertional variants of the molecule include the fusion to the N- or C-terminus to a polypeptide which increases the serum half-life of the TNF ligand trimer-containing antigen binding molecules.

[0176] In certain embodiments, the TNF family ligand trimer-containing antigen binding molecules provided herein are altered to increase or decrease the extent to which the antibody is glycosylated. Glycosylation variants of the molecules may be conveniently obtained by altering the amino acid sequence such that one or more glycosylation sites is created or removed. Where the TNF ligand trimer-containing antigen binding molecule comprises an Fc region, the carbohydrate attached thereto may be altered. Native antibodies produced by mammalian cells typically comprise a branched, biantennary oligosaccharide that is generally attached by an N-linkage to Asn297 of the CH2 domain of the Fc region. See, e.g., Wright et al. TIBTECH 15:26-32 (1997). The oligosaccharide may include various carbohydrates, e.g., mannose, N-acetyl glucosamine (GlcNAc), galactose, and sialic acid, as well as a fucose attached to a GlcNAc in the “stem” of the biantennary oligosaccharide structure. In some embodiments, modifications of the oligosaccharide in TNF family ligand trimer-containing antigen binding molecule may be made in order to create variants with certain improved properties. In one aspect, variants of TNF family ligand trimer-containing antigen binding molecules are provided having a carbohydrate structure that lacks fucose attached (directly or indirectly) to an Fc region. Such fucosylation variants may have improved ADCC function, see e.g. US Patent Publication Nos. US 2003/0157108 (Presta, L.) or US 2004/0093621 (Kyowa Hakko Kogyo Co., Ltd). Further variants of the TNF family ligand trimer-containing antigen binding molecules of the invention include those with bisected oligosaccharides, e.g., in which a biantennary oligosaccharide attached to the Fc region is bisected by GlcNAc. Such variants may have reduced fucosylation and/or improved ADCC function., see for example WO 2003/011878 (Jean-Mairet et al.); U.S. Pat. No. 6,602,684 (Umana et al.); and US 2005/0123546 (Umana et al.). Variants with at least one galactose residue in the oligosaccharide attached to the Fc region are also provided. Such antibody variants may have improved CDC function and are described, e.g., in WO 1997/30087 (Patel et al.); WO 1998/58964 (Raju, S.); and WO 1999/22764 (Raju, S.).

[0177] In certain embodiments, it may be desirable to create cysteine engineered variants of the TNF family ligand trimer-containing antigen binding molecule of the invention, e.g., “thioMAbs,” in which one or more residues of the molecule are substituted with cysteine residues. In particular embodiments, the substituted residues occur at accessible sites of the molecule. By substituting those residues with cysteine, reactive thiol groups are thereby positioned at accessible sites of the antibody and may be used to conjugate the antibody to other moieties, such as drug moieties or linker-drug moieties, to create an immunoconjugate. In certain embodiments, any one or more of the following residues may be substituted with cysteine: V205 (Kabat numbering) of the light chain; A118 (EU numbering) of the heavy chain; and S400 (EU numbering) of the heavy chain Fc region. Cysteine engineered antigen binding molecules may be generated as described, e.g., in U.S. Pat. No. 7,521,541.

[0178] In certain aspects, the TNF family ligand trimer-containing antigen binding molecules provided herein may be further modified to contain additional non-proteinaceous moieties that are known in the art and readily available. The moieties suitable for derivatization of the antibody include but are not limited to water soluble polymers. Non-limiting examples of water soluble polymers include, but are not limited to, polyethylene glycol (PEG), copolymers of ethylene glycol/propylene glycol, carboxymethylcellulose, dextran, polyvinyl alcohol, polyvinyl pyrrolidone, poly-1, 3-dioxolane, poly-1,3,6-trioxane, ethylene/maleic anhydride copolymer, polyaminoacids (either homopolymers or random copolymers), and dextran or poly(n-vinyl pyrrolidone)polyethylene glycol, propropylene glycol homopolymers, prolypropylene oxide/ethylene oxide co-polymers, polyoxyethylated polyols (e.g., glycerol), polyvinyl alcohol, and mixtures thereof. Polyethylene glycol propionaldehyde may have advantages in manufacturing due to its stability in water. The polymer may be of any molecular weight, and may be branched or unbranched. The number of polymers attached to the antibody may vary, and if more than one polymer is attached, they can be the same or different molecules. In general, the number and/or type of polymers used for derivatization can be determined based on considerations including, but not limited to, the particular properties or functions of the antibody to be improved, whether the bispecific antibody derivative will be used in a therapy under defined conditions, etc. In another aspect, conjugates of an antibody and non-proteinaceous moiety that may be selectively heated by exposure to radiation are provided. In one embodiment, the non-proteinaceous moiety is a carbon nanotube (Kam, N. W. et al., Proc. Natl. Acad. Sci. USA 102 (2005) 11600-11605). The radiation may be of any wavelength, and includes, but is not limited to, wavelengths that do not harm ordinary cells, but which heat the non-proteinaceous moiety to a temperature at which cells proximal to the antibody-non-proteinaceous moiety are killed.

[0179] In another aspect, immunoconjugates of the TNF family ligand trimer-containing antigen binding molecules provided herein maybe obtained. An “immunoconjugate” is an antibody conjugated to one or more heterologous molecule(s), including but not limited to a cytotoxic agent.

[0180] The term “polynucleotide” refers to an isolated nucleic acid molecule or construct, e.g. messenger RNA (mRNA), virally-derived RNA, or plasmid DNA (pDNA). A polynucleotide may comprise a conventional phosphodiester bond or a non-conventional bond (e.g. an amide bond, such as found in peptide nucleic acids (PNA). The term “nucleic acid molecule” refers to any one or more nucleic acid segments, e.g. DNA or RNA fragments, present in a polynucleotide.

[0181] By “isolated” nucleic acid molecule or polynucleotide is intended a nucleic acid molecule, DNA or RNA, which has been removed from its native environment. For example, a recombinant polynucleotide encoding a polypeptide contained in a vector is considered isolated for the purposes of the present invention. Further examples of an isolated polynucleotide include recombinant polynucleotides maintained in heterologous host cells or purified (partially or substantially) polynucleotides in solution. An isolated polynucleotide includes a polynucleotide molecule contained in cells that ordinarily contain the polynucleotide molecule, but the polynucleotide molecule is present extrachromosomally or at a chromosomal location that is different from its natural chromosomal location. Isolated RNA molecules include in vivo or in vitro RNA transcripts of the present invention, as well as positive and negative strand forms, and double-stranded forms. Isolated polynucleotides or nucleic acids according to the present invention further include such molecules produced synthetically. In addition, a polynucleotide or a nucleic acid may be or may include a regulatory element such as a promoter, ribosome binding site, or a transcription terminator.

[0182] By a nucleic acid or polynucleotide having a nucleotide sequence at least, for example, 95% “identical” to a reference nucleotide sequence of the present invention, it is intended that the nucleotide sequence of the polynucleotide is identical to the reference sequence except that the polynucleotide sequence may include up to five point mutations per each 100 nucleotides of the reference nucleotide sequence. In other words, to obtain a polynucleotide having a nucleotide sequence at least 95% identical to a reference nucleotide sequence, up to 5% of the nucleotides in the reference sequence may be deleted or substituted with another nucleotide, or a number of nucleotides up to 5% of the total nucleotides in the reference sequence may be inserted into the reference sequence. These alterations of the reference sequence may occur at the 5′ or 3′ terminal positions of the reference nucleotide sequence or anywhere between those terminal positions, interspersed either individually among residues in the reference sequence or in one or more contiguous groups within the reference sequence. As a practical matter, whether any particular polynucleotide sequence is at least 80%, 85%, 90%, 95%, 96%, 97%, 98% or 99% identical to a nucleotide sequence of the present invention can be determined conventionally using known computer programs, such as the ones discussed above for polypeptides (e.g. ALIGN-2).

[0183] The term “expression cassette” refers to a polynucleotide generated recombinantly or synthetically, with a series of specified nucleic acid elements that permit transcription of a particular nucleic acid in a target cell. The recombinant expression cassette can be incorporated into a plasmid, chromosome, mitochondrial DNA, plastid DNA, virus, or nucleic acid fragment. Typically, the recombinant expression cassette portion of an expression vector includes, among other sequences, a nucleic acid sequence to be transcribed and a promoter. In certain embodiments, the expression cassette of the invention comprises polynucleotide sequences that encode bispecific antigen binding molecules of the invention or fragments thereof.

[0184] The term “vector” or “expression vector” is synonymous with “expression construct” and refers to a DNA molecule that is used to introduce and direct the expression of a specific gene to which it is operably associated in a target cell. The term includes the vector as a self-replicating nucleic acid structure as well as the vector incorporated into the genome of a host cell into which it has been introduced. The expression vector of the present invention comprises an expression cassette. Expression vectors allow transcription of large amounts of stable mRNA. Once the expression vector is inside the target cell, the ribonucleic acid molecule or protein that is encoded by the gene is produced by the cellular transcription and/or translation machinery. In one embodiment, the expression vector of the invention comprises an expression cassette that comprises polynucleotide sequences that encode bispecific antigen binding molecules of the invention or fragments thereof.

[0185] The terms “host cell”, “host cell line,” and “host cell culture” are used interchangeably and refer to cells into which exogenous nucleic acid has been introduced, including the progeny of such cells. Host cells include “transformants” and “transformed cells,” which include the primary transformed cell and progeny derived therefrom without regard to the number of passages. Progeny may not be completely identical in nucleic acid content to a parent cell, but may contain mutations. Mutant progeny that have the same function or biological activity as screened or selected for in the originally transformed cell are included herein. A host cell is any type of cellular system that can be used to generate the bispecific antigen binding molecules of the present invention. Host cells include cultured cells, e.g. mammalian cultured cells, such as CHO cells, BHK cells, NS0 cells, SP2/0 cells, YO myeloma cells, P3X63 mouse myeloma cells, PER cells, PER.C6 cells or hybridoma cells, yeast cells, insect cells, and plant cells, to name only a few, but also cells comprised within a transgenic animal, transgenic plant or cultured plant or animal tissue.

[0186] An “effective amount” of an agent refers to the amount that is necessary to result in a physiological change in the cell or tissue to which it is administered.

[0187] A “therapeutically effective amount” of an agent, e.g. a pharmaceutical composition, refers to an amount effective, at dosages and for periods of time necessary, to achieve the desired therapeutic or prophylactic result. A therapeutically effective amount of an agent for example eliminates, decreases, delays, minimizes or prevents adverse effects of a disease.

[0188] An “individual” or “subject” is a mammal. Mammals include, but are not limited to, domesticated animals (e.g. cows, sheep, cats, dogs, and horses), primates (e.g. humans and non-human primates such as monkeys), rabbits, and rodents (e.g. mice and rats). Particularly, the individual or subject is a human.

[0189] The term “pharmaceutical composition” refers to a preparation which is in such form as to permit the biological activity of an active ingredient contained therein to be effective, and which contains no additional components which are unacceptably toxic to a subject to which the formulation would be administered.

[0190] A “pharmaceutically acceptable excipient” refers to an ingredient in a pharmaceutical composition, other than an active ingredient, which is nontoxic to a subject. A pharmaceutically acceptable excipient includes, but is not limited to, a buffer, a stabilizer, or a preservative.

[0191] The term “package insert” is used to refer to instructions customarily included in commercial packages of therapeutic products, that contain information about the indications, usage, dosage, administration, combination therapy, contraindications and/or warnings concerning the use of such therapeutic products.

[0192] As used herein, “treatment” (and grammatical variations thereof such as “treat” or “treating”) refers to clinical intervention in an attempt to alter the natural course of the individual being treated, and can be performed either for prophylaxis or during the course of clinical pathology. Desirable effects of treatment include, but are not limited to, preventing occurrence or recurrence of disease, alleviation of symptoms, diminishment of any direct or indirect pathological consequences of the disease, preventing metastasis, decreasing the rate of disease progression, amelioration or palliation of the disease state, and remission or improved prognosis. In some embodiments, the molecules of the invention are used to delay development of a disease or to slow the progression of a disease.

[0193] The term “cancer” as used herein refers to proliferative diseases, such as lymphomas, carcinoma, lymphoma, blastoma, sarcoma, leukemia, lymphocytic leukemias, lung cancer, non-small cell lung (NSCL) cancer, bronchioloalviolar cell lung cancer, bone cancer, pancreatic cancer, skin cancer, cancer of the head or neck, cutaneous or intraocular melanoma, uterine cancer, ovarian cancer, rectal cancer, cancer of the anal region, stomach cancer, gastric cancer, colorectal cancer (CRC), pancreatic cancer, breast cancer, triple-negative breast cancer, uterine cancer, carcinoma of the fallopian tubes, carcinoma of the endometrium, carcinoma of the cervix, carcinoma of the vagina, carcinoma of the vulva, Hodgkin's Disease, cancer of the esophagus, cancer of the small intestine, cancer of the endocrine system, cancer of the thyroid gland, cancer of the parathyroid gland, cancer of the adrenal gland, sarcoma of soft tissue, cancer of the urethra, cancer of the penis, prostate cancer, cancer of the bladder, cancer of the kidney or ureter, renal cell carcinoma, carcinoma of the renal pelvis, mesothelioma, hepatocellular cancer, biliary cancer, neoplasms of the central nervous system (CNS), spinal axis tumors, brain stem glioma, glioblastoma multiforme, astrocytomas, schwanomas, ependymonas, medulloblastomas, meningiomas, squamous cell carcinomas, pituitary adenoma and Ewings sarcoma, melanoma, multiple myeloma, B-cell cancer (lymphoma), chronic lymphocytic leukemia (CLL), acute lymphoblastic leukemia (ALL), hairy cell leukemia, chronic myeloblastic leukemia, including refractory versions of any of the above cancers, or a combination of one or more of the above cancers.

[0194] TNF Family Ligand Trimer-Containing Antigen Binding Molecules of the Invention

[0195] The invention provides novel TNF family ligand trimer-containing antigen binding molecules with particularly advantageous properties such as producibility, stability, robustness, binding affinity, biological activity, targeting efficiency and reduced toxicity.

[0196] In a first aspect, the invention provides a TNF family ligand trimer-containing antigen binding molecule comprising
[0197] (a) a Fab domain capable of specific binding to a target cell antigen,
[0198] (b) a Fc domain composed of a first and a second subunit capable of stable association, and
[0199] (c) a first polypeptide comprising two ectodomains of a TNF ligand family member or fragments thereof that are connected to each other by a peptide linker and a second polypeptide comprising one ectodomain of said TNF ligand family member or a fragment thereof, wherein the first polypeptide is fused at its N-terminus to the C-terminus to one of the subunits of the Fc domain and wherein the second polypeptide is fused at its N-terminus to the C-terminus of the other subunit of the Fc domain.

[0200] In a particular aspect, the invention provides a costimulatory TNF family ligand trimer-containing antigen binding molecule comprising
[0201] (a) a Fab domain capable of specific binding to a target cell antigen,
[0202] (b) a Fc domain composed of a first and a second subunit capable of stable association, and
[0203] (c) a first polypeptide comprising two ectodomains of a costimulatory TNF ligand family member or fragments thereof that are connected to each other by a peptide linker and a second polypeptide comprising one ectodomain of said costimulatory TNF ligand family member or a fragment thereof, wherein the first polypeptide is fused at its N-terminus to the C-terminus to one of the subunits of the Fc domain and wherein the second polypeptide is fused at its N-terminus to the C-terminus of the other subunit of the Fc domain. Thus, the TNF family ligand trimer-containing antigen binding molecule comprises (a) a Fab domain capable of specific binding to a target cell antigen, (b) a Fc domain composed of a first and a second subunit capable of stable association, and (c) a first polypeptide comprising two ectodomains of a TNF ligand family member or fragments thereof that are connected to each other by a peptide linker and a second polypeptide comprising one ectodomain of said TNF ligand family member or a fragment thereof, wherein the first polypeptide is fused at its N-terminus to the C-terminus to one of the subunits of the Fc domain and wherein the second polypeptide is fused at its N-terminus to the C-terminus of the other subunit of the Fc domain, wherein the TNF ligand family member costimulates human T-cell activation.

[0204] In another particular aspect, the TNF family ligand trimer-containing antigen binding molecule (a) a Fab domain capable of specific binding to a target cell antigen,
[0205] (b) a Fc domain composed of a first and a second subunit capable of stable association, and
[0206] (c) a first polypeptide comprising two ectodomains of a TNF ligand family member or fragments thereof that are connected to each other by a peptide linker and a second polypeptide comprising one ectodomain of said TNF ligand family member or a fragment thereof, wherein the first polypeptide is fused at its N-terminus to the C-terminus to one of the subunits of the Fc domain and wherein the second polypeptide is fused at its N-terminus to the C-terminus of the other subunit of the Fc domain, wherein the ectodomains of a TNF ligand family member are identical in all instances.

[0207] In a particular aspect, the TNF family ligand trimer-containing antigen binding molecule comprises a TNF ligand family member that costimulates human T-cell activation which is selected from 4-1BBL and OX40L. More particularly, the TNF ligand family member is 4-1BBL.

[0208] In a further aspect, the ectodomain of a TNF ligand family member comprises the amino acid sequence selected from the group consisting of SEQ ID NO:1, SEQ ID NO: 2, SEQ ID NO:3, SEQ ID NO:4, SEQ ID NO:5, SEQ ID NO:6, SEQ ID NO:7 and SEQ ID NO:8, particularly the amino acid sequence of SEQ ID NO:1 or SEQ ID NO:5.

[0209] In a particular aspect, the ectodomain of a TNF ligand family member comprises the amino acid sequence selected from the group consisting of SEQ ID NO:5, SEQ ID NO:6, SEQ ID NO:7 and SEQ ID NO:8. More particularly, the ectodomain of a TNF ligand family member comprises the amino acid sequence of SEQ ID NO:5.

[0210] In a further aspect, the TNF family ligand trimer-containing antigen binding molecule of the invention comprises
[0211] (a) a Fab domain capable of specific binding to a target cell antigen,
[0212] (b) a Fc domain composed of a first and a second subunit capable of stable association, and
[0213] (c) a first polypeptide comprising two ectodomains of a TNF ligand family member or fragments thereof that are connected to each other by a peptide linker and a second polypeptide comprising one ectodomain of said TNF ligand family member or a fragment thereof, wherein the first polypeptide is fused at its N-terminus to the C-terminus to one of the subunits of the Fc domain and wherein the second polypeptide is fused at its N-terminus to the C-terminus of the other subunit of the Fc domain and wherein the first polypeptide comprising two ectodomains of a TNF ligand family member or fragments thereof comprises an amino acid sequence selected from the group consisting of SEQ ID NO:9 and SEQ ID NO:10 and the second polypeptide comprising one ectodomain of said TNF ligand family member or a fragment thereof comprises the amino acid sequence selected from the group consisting of SEQ ID NO:1 and SEQ ID NO:5. In one aspect, the first polypeptide comprising two ectodomains of a TNF ligand family member or fragments thereof comprises an amino acid sequence SEQ ID NO:9 and the second polypeptide comprising one ectodomain of said TNF ligand family member or a fragment thereof comprises the amino acid sequence of SEQ ID NO:1. In a particular aspect, the first polypeptide comprising two ectodomains of a TNF ligand family member or fragments thereof comprises an amino acid sequence of SEQ ID NO:10 and the second polypeptide comprising one ectodomain of said TNF ligand family member or a fragment thereof comprises the amino acid sequence of SEQ ID NO:5.

[0214] In a further aspect, provided is aTNF family ligand trimer-containing antigen binding molecule as described herein before, wherein the TNF ligand family member is OX40L. In one aspect, provided is TNF family ligand trimer-containing antigen binding molecule, wherein the ectodomain of a TNF ligand family member comprises the amino acid sequence selected from the group consisting of SEQ ID NO:11 and SEQ ID NO:12.

[0215] In one aspect, the invention provides a TNF family ligand trimer-containing antigen binding molecule comprising
[0216] (a) one Fab domain capable of specific binding to a target cell antigen,
[0217] (b) a Fc domain composed of a first and a second subunit capable of stable association, and
[0218] (c) a first polypeptide comprising two ectodomains of a TNF ligand family member or fragments thereof that are connected to each other by a peptide linker and a second polypeptide comprising one ectodomain of said TNF ligand family member or a fragment thereof, wherein the first polypeptide is fused at its N-terminus to the C-terminus to one of the subunits of the Fc domain and wherein the second polypeptide is fused at its N-terminus to the C-terminus of the other subunit of the Fc domain. The invention thus relates to a TNF family ligand trimer-containing antigen binding molecule, wherein TNF family ligand trimer-containing antigen binding molecule is monovalent for the binding to the target cell antigen.

[0219] In another aspect, provided is a TNF family ligand trimer-containing antigen binding molecule of the invention, wherein the target cell antigen is selected from the group consisting of Fibroblast Activation Protein (FAP), CD19, Carcinoembryonic Antigen (CEA), Melanoma-associated Chondroitin Sulfate Proteoglycan (MCSP), Epidermal Growth Factor Receptor (EGFR), CD20 and CD33. In one aspect, the target cell antigen is selected from the group consisting of Fibroblast Activation Protein (FAP), CD19 and Carcinoembryonic Antigen (CEA).

[0220] In a particular aspect, provided is a TNF family ligand trimer-containing antigen binding molecule, wherein the Fab domain capable of specific binding to a target cell antigen is a Fab or a crossover Fab capable of specific binding to a target cell antigen.

[0221] In a particular aspect, the target cell antigen is Fibroblast Activation Protein (FAP).

[0222] In one aspect, the invention provides a TNF family ligand trimer-containing antigen binding molecule, wherein the Fab domain capable of specific binding to FAP comprises
[0223] (a) a VH domain comprising (i) CDR-H1 comprising the amino acid sequence of SEQ ID NO:13, (ii) CDR-H2 comprising the amino acid sequence of SEQ ID NO:14 and (iii) CDR-H3 comprising the amino acid sequence of SEQ ID NO:15, and a VL domain comprising (iv) CDR-L1 comprising the amino acid sequence of SEQ ID NO:16, (v) CDR-L2 comprising the amino acid sequence of SEQ ID NO:17 and (vi) CDR-L3 comprising the amino acid sequence of SEQ ID NO:18 or
[0224] (b) a VH domain comprising (i) CDR-H1 comprising the amino acid sequence of SEQ ID NO:19, (ii) CDR-H2 comprising the amino acid sequence of SEQ ID NO:20 and (iii) CDR-H3 comprising the amino acid sequence of SEQ ID NO:21, and a VL domain comprising (iv) CDR-L1 comprising the amino acid sequence of SEQ ID NO:22, (v) CDR-L2 comprising the amino acid sequence of SEQ ID NO:23 and (vi) CDR-L3 comprising the amino acid sequence of SEQ ID NO:24.

[0225] In a particular aspect, the invention provides a TNF family ligand trimer-containing antigen binding molecule, wherein the Fab domain capable of specific binding to FAP comprises a VH domain comprising (i) CDR-H1 comprising the amino acid sequence of SEQ ID NO:19, (ii)

[0226] CDR-H2 comprising the amino acid sequence of SEQ ID NO:20 and (iii) CDR-H3 comprising the amino acid sequence of SEQ ID NO:21, and a VL domain comprising (iv) CDR-L1 comprising the amino acid sequence of SEQ ID NO:22, (v) CDR-L2 comprising the amino acid sequence of SEQ ID NO:23 and (vi) CDR-L3 comprising the amino acid sequence of SEQ ID NO:24.

[0227] In a further aspect, provided is a TNF family ligand trimer-containing antigen binding molecule as described herein before, wherein the Fab domain capable of specific binding to FAP comprises a variable heavy chain comprising an amino acid sequence of SEQ ID NO:25 and a variable light chain comprising an amino acid sequence of SEQ ID NO:26 or wherein the Fab domain capable of specific binding to FAP comprises a variable heavy chain comprising an amino acid sequence of SEQ ID NO:27 and a variable light chain comprising an amino acid sequence of SEQ ID NO:28.

[0228] In another particular aspect, the target cell antigen is CD19.

[0229] In one aspect, the invention provides a TNF family ligand trimer-containing antigen binding molecule, wherein the Fab domain capable of specific binding to CD19 comprises
[0230] (a) a VH domain comprising (i) CDR-H1 comprising the amino acid sequence of SEQ ID NO:29, (ii) CDR-H2 comprising the amino acid sequence of SEQ ID NO:30 and (iii) CDR-H3 comprising the amino acid sequence of SEQ ID NO:31, and a VL domain comprising (iv) CDR-L1 comprising the amino acid sequence of SEQ ID NO:32, (v) CDR-L2 comprising the amino acid sequence of SEQ ID NO:33 and (vi) CDR-L3 comprising the amino acid sequence of SEQ ID NO:34 or
[0231] (b) a VH domain comprising (i) CDR-H1 comprising the amino acid sequence of SEQ ID NO:35, (ii) CDR-H2 comprising the amino acid sequence of SEQ ID NO:36 and (iii) CDR-H3 comprising the amino acid sequence of SEQ ID NO:37, and a VL domain comprising (iv) CDR-L1 comprising the amino acid sequence of SEQ ID NO:38, (v) CDR-L2 comprising the amino acid sequence of SEQ ID NO:39 and (vi) CDR-L3 comprising the amino acid sequence of SEQ ID NO:40.

[0232] In a particular aspect, the invention provides a TNF family ligand trimer-containing antigen binding molecule, wherein the Fab domain capable of specific binding to CD19 comprises a VH domain comprising (i) CDR-H1 comprising the amino acid sequence of SEQ ID NO:35, (ii) CDR-H2 comprising the amino acid sequence of SEQ ID NO:36 and (iii) CDR-H3 comprising the amino acid sequence of SEQ ID NO:37, and a VL domain comprising (iv) CDR-L1 comprising the amino acid sequence of SEQ ID NO:38, (v) CDR-L2 comprising the amino acid sequence of SEQ ID NO:39 and (vi) CDR-L3 comprising the amino acid sequence of SEQ ID NO:40.

[0233] In a further aspect, provided is a TNF family ligand trimer-containing antigen binding molecule as described herein before, wherein the Fab domain capable of specific binding to CD19 comprises a variable heavy chain comprising an amino acid sequence of SEQ ID NO:41 and a variable light chain comprising an amino acid sequence of SEQ ID NO:42 or wherein the Fab domain capable of specific binding to FAP comprises a variable heavy chain comprising an amino acid sequence of SEQ ID NO:43 and a variable light chain comprising an amino acid sequence of SEQ ID NO:44.

[0234] In another particular aspect, the target cell antigen is CEA.

[0235] In one aspect, the invention provides a TNF family ligand trimer-containing antigen binding molecule, wherein the Fab domain capable of specific binding to CEA comprises a VH domain comprising (i) CDR-H1 comprising the amino acid sequence of SEQ ID NO:45, (ii) CDR-H2 comprising the amino acid sequence of SEQ ID NO:46 and (iii) CDR-H3 comprising the amino acid sequence of SEQ ID NO:47, and a VL domain comprising (iv) CDR-L1 comprising the amino acid sequence of SEQ ID NO:48, (v) CDR-L2 comprising the amino acid sequence of SEQ ID NO:49 and (vi) CDR-L3 comprising the amino acid sequence of SEQ ID NO:50.

[0236] In a particular aspect, provided is a TNF family ligand trimer-containing antigen binding molecule as described herein before, wherein the Fab domain capable of specific binding to CEA comprises a variable heavy chain comprising an amino acid sequence of SEQ ID NO:51 and a variable light chain comprising an amino acid sequence of SEQ ID NO:52.

[0237] In a further aspect, the Fc domain is an IgG, particularly an IgG1 Fc domain or an IgG4 Fc domain. More particularly, the Fc domain is an IgG1 Fc domain. In a particular aspect, the Fc domain comprises a modification promoting the association of the first and second subunit of the Fc domain.

[0238] In particular, the TNF family ligand trimer-containing antigen binding molecule of the invention comprises a Fab domain capable of specific binding to a target cell antigen, wherein the Fab heavy chain is fused at the C-terminus to the N-terminus of a CH2 domain in the Fc domain.

[0239] In another aspect, the invention is concerned with a TNF family ligand trimer-containing antigen binding molecule as defined herein before, comprising

(b) an Fc domain composed of a first and a second subunit capable of stable association, wherein the Fc domain comprises one or more amino acid substitution that reduces binding to an Fc receptor, in particular towards Fcγ receptor.

[0240] Fc Domain Modifications Reducing Fc Receptor Binding and/or Effector Function

[0241] The Fc domain of the TNF family ligand trimer-containing antigen binding molecules of the invention consists of a pair of polypeptide chains comprising heavy chain domains of an immunoglobulin molecule. For example, the Fc domain of an immunoglobulin G (IgG) molecule is a dimer, each subunit of which comprises the CH2 and CH3 IgG heavy chain constant domains. The two subunits of the Fc domain are capable of stable association with each other.

[0242] The Fc domain confers favorable pharmacokinetic properties to the antigen binding molecules of the invention, including a long serum half-life which contributes to good accumulation in the target tissue and a favorable tissue-blood distribution ratio. At the same time it may, however, lead to undesirable targeting of the bispecific antibodies of the invention to cells expressing Fc receptors rather than to the preferred antigen-bearing cells. Accordingly, in particular aspects, the Fc domain of the TNF family ligand trimer-containing antigen binding molecule of the invention exhibits reduced binding affinity to an Fc receptor and/or reduced effector function, as compared to a native IgG1 Fc domain. In one aspect, the Fc does not substantially bind to an Fc receptor and/or does not induce effector function. In a particular aspect the Fc receptor is an Fcγ receptor. In one aspect, the Fc receptor is a human Fc receptor. In a specific aspect, the Fc receptor is an activating human Fcγ receptor, more specifically human FcγRIIIa, FcγRI or FcγRIIa, most specifically human FcγRIIIa. In one aspect, the Fc domain does not induce effector function. The reduced effector function can include, but is not limited to, one or more of the following: reduced complement dependent cytotoxicity (CDC), reduced antibody-dependent cell-mediated cytotoxicity (ADCC), reduced antibody-dependent cellular phagocytosis (ADCP), reduced cytokine secretion, reduced immune complex-mediated antigen uptake by antigen-presenting cells, reduced binding to NK cells, reduced binding to macrophages, reduced binding to monocytes, reduced binding to polymorphonuclear cells, reduced direct signaling inducing apoptosis, reduced dendritic cell maturation, or reduced T cell priming.

[0243] In certain aspects, one or more amino acid modifications may be introduced into the Fc region of a TNF family ligand trimer-containing antigen binding molecule provided herein, thereby generating an Fc region variant. The Fc region variant may comprise a human Fc region sequence (e.g., a human IgG1, IgG2, IgG3 or IgG4 Fc region) comprising an amino acid modification (e.g. a substitution) at one or more amino acid positions.

[0244] In a particular aspect, the invention provides a TNF family ligand trimer-containing antigen binding molecule comprising
[0245] (a) a Fab domain capable of specific binding to a target cell antigen,
[0246] (b) a Fc domain composed of a first and a second subunit capable of stable association, and
[0247] (c) a first polypeptide comprising two ectodomains of a TNF ligand family member or fragments thereof that are connected to each other by a peptide linker and a second polypeptide comprising one ectodomain of said TNF ligand family member or a fragment thereof, wherein the first polypeptide is fused at its N-terminus to the C-terminus to one of the subunits of the Fc domain and wherein the second polypeptide is fused at its N-terminus to the C-terminus of the other subunit of the Fc domain, wherein the Fc domain comprises one or more amino acid substitution that reduces binding to an Fc receptor, in particular towards Fcγ receptor.

[0248] In one aspect, the Fc domain of the TNF family ligand trimer-containing antigen binding molecule of the invention comprises one or more amino acid mutation that reduces the binding affinity of the Fc domain to an Fc receptor and/or effector function. Typically, the same one or more amino acid mutation is present in each of the two subunits of the Fc domain. In particular, the Fc domain comprises an amino acid substitution at a position of E233, L234, L235, N297, P331 and P329 (EU numbering). In particular, the Fc domain comprises amino acid substitutions at positions 234 and 235 (EU numbering) and/or 329 (EU numbering) of the IgG heavy chains. More particularly, provided is a trimeric TNF family ligand-containing antigen binding molecule according to the invention which comprises an Fc domain with the amino acid substitutions L234A, L235A and P329G (“P329G LALA”, EU numbering) in the IgG heavy chains. The amino acid substitutions L234A and L235A refer to the so-called LALA mutation. The “P329G LALA” combination of amino acid substitutions almost completely abolishes Fcγ receptor binding of a human IgG1 Fc domain and is described in International Patent Appl. Publ. No. WO 2012/130831 A1 which also describes methods of preparing such mutant Fc domains and methods for determining its properties such as Fc receptor binding or effector functions. “EU numbering” refers to the numbering according to EU index of Kabat et al , Sequences of Proteins of Immunological Interest, 5th Ed. Public Health Service, National Institutes of Health, Bethesda, Md., 1991.

[0249] Fc domains with reduced Fc receptor binding and/or effector function also include those with substitution of one or more of Fc domain residues 238, 265, 269, 270, 297, 327 and 329 (U.S. Pat. No. 6,737,056). Such Fc mutants include Fc mutants with substitutions at two or more of amino acid positions 265, 269, 270, 297 and 327, including the so-called “DANA” Fc mutant with substitution of residues 265 and 297 to alanine (U.S. Pat. No. 7,332,581).

[0250] In another aspect, the Fc domain is an IgG4 Fc domain. IgG4 antibodies exhibit reduced binding affinity to Fc receptors and reduced effector functions as compared to IgG1 antibodies. In a more specific aspect, the Fc domain is an IgG4 Fc domain comprising an amino acid substitution at position S228 (Kabat numbering), particularly the amino acid substitution S228P. In a more specific aspect, the Fc domain is an IgG4 Fc domain comprising amino acid substitutions L235E and S228P and P329G (EU numbering). Such IgG4 Fc domain mutants and their Fcγ receptor binding properties are also described in WO 2012/130831.

[0251] Mutant Fc domains can be prepared by amino acid deletion, substitution, insertion or modification using genetic or chemical methods well known in the art. Genetic methods may include site-specific mutagenesis of the encoding DNA sequence, PCR, gene synthesis, and the like. The correct nucleotide changes can be verified for example by sequencing.

[0252] Binding to Fc receptors can be easily determined e.g. by ELISA, or by Surface Plasmon Resonance (SPR) using standard instrumentation such as a BIAcore instrument (GE Healthcare), and Fc receptors such as may be obtained by recombinant expression. A suitable such binding assay is described herein. Alternatively, binding affinity of Fc domains or cell activating bispecific antigen binding molecules comprising an Fc domain for Fc receptors may be evaluated using cell lines known to express particular Fc receptors, such as human NK cells expressing FcγIIIa receptor.

[0253] Effector function of an Fc domain, or bispecific antibodies of the invention comprising an Fc domain, can be measured by methods known in the art. A suitable assay for measuring ADCC is described herein. Other examples of in vitro assays to assess ADCC activity of a molecule of interest are described in U.S. Pat. No. 5,500,362; Hellstrom et al. Proc Natl Acad Sci USA 83, 7059-7063 (1986) and Hellstrom et al., Proc Natl Acad Sci USA 82, 1499-1502 (1985); U.S. Pat. No. 5,821,337; Bruggemann et al., J Exp Med 166, 1351-1361 (1987). Alternatively, non-radioactive assays methods may be employed (see, for example, ACTI™ non-radioactive cytotoxicity assay for flow cytometry (CellTechnology, Inc. Mountain View, Calif.); and CytoTox 96® non-radioactive cytotoxicity assay (Promega, Madison, Wis.)). Useful effector cells for such assays include peripheral blood mononuclear cells (PBMC) and Natural Killer (NK) cells. Alternatively, or additionally, ADCC activity of the molecule of interest may be assessed in vivo, e.g. in a animal model such as that disclosed in Clynes et al., Proc Natl Acad Sci USA 95, 652-656 (1998).

[0254] In some embodiments, binding of the Fc domain to a complement component, specifically to C1q, is reduced. Accordingly, in some embodiments wherein the Fc domain is engineered to have reduced effector function, said reduced effector function includes reduced CDC. C1q binding assays may be carried out to determine whether the bispecific antibodies of the invention is able to bind C1q and hence has CDC activity. See e.g., C1q and C3c binding ELISA in WO 2006/029879 and WO 2005/100402. To assess complement activation, a CDC assay may be performed (see, for example, Gazzano-Santoro et al., J Immunol Methods 202, 163 (1996); Cragg et al., Blood 101, 1045-1052 (2003); and Cragg and Glennie, Blood 103, 2738-2743 (2004)).

[0255] In a particular aspect, the Fc domain comprises a modification promoting the association of the first and second subunit of the Fc domain.

[0256] Fc Domain Modifications Promoting Heterodimerization

[0257] In one aspect, the TNF family ligand trimer-containing antigen binding molecules of the invention comprise (a) a Fab domain capable of specific binding to a target cell antigen, (b) a Fc domain composed of a first and a second subunit capable of stable association, and (c) a first polypeptide comprising two ectodomains of a TNF ligand family member or fragments thereof that are connected to each other by a peptide linker and a second polypeptide comprising one ectodomain of said TNF ligand family member or a fragment thereof, wherein the first polypeptide is fused at its N-terminus to the C-terminus to one of the subunits of the Fc domain and wherein the second polypeptide is fused at its N-terminus to the C-terminus of the other subunit of the Fc domain, wherein the Fc domain comprises one or more amino acid substitution that reduces binding to an Fc receptor, in particular towards Fcγ receptor. Thus, they comprise different moieties, fused to one or the other of the two subunits of the Fc domain that are typically comprised in two non-identical polypetide chains (“heavy chains”). Recombinant co-expression of these polypeptides and subsequent dimerization leads to several possible combinations of the two polypeptides. To improve the yield and purity of the TNF family ligand trimer-containing antigen binding molecules in recombinant production, it will thus be advantageous to introduce in the Fc domain of the TNF family ligand trimer-containing antigen binding molecules of the invention a modification promoting the association of the desired polypeptides.

[0258] Accordingly, the Fc domain of the TNF family ligand trimer-containing antigen binding molecules of the invention comprises a modification promoting the association of the first and the second subunit of the Fc domain. The site of most extensive protein-protein interaction between the two subunits of a human IgG Fc domain is in the CH3 domain of the Fc domain. Thus, said modification is particularly in the CH3 domain of the Fc domain.

[0259] In a specific aspect, said modification is a so-called “knob-into-hole” modification, comprising a “knob” modification in one of the two subunits of the Fc domain and a “hole” modification in the other one of the two subunits of the Fc domain. Thus, in a particular aspect, the invention relates to a TNF family ligand trimer-containing antigen binding molecule as described herein before which comprises an IgG molecule, wherein the Fc part of the first heavy chain comprises a first dimerization module and the Fc part of the second heavy chain comprises a second dimerization module allowing a heterodimerization of the two heavy chains of the IgG molecule and the first dimerization module comprises knobs and the second dimerization module comprises holes according to the knob into hole technology.

[0260] The knob-into-hole technology is described e.g. in U.S. Pat. Nos. 5,731,168; 7,695,936; Ridgway et al., Prot Eng 9, 617-621 (1996) and Carter, J Immunol Meth 248, 7-15 (2001). Generally, the method involves introducing a protuberance (“knob”) at the interface of a first polypeptide and a corresponding cavity (“hole”) in the interface of a second polypeptide, such that the protuberance can be positioned in the cavity so as to promote heterodimer formation and hinder homodimer formation. Protuberances are constructed by replacing small amino acid side chains from the interface of the first polypeptide with larger side chains (e.g. tyrosine or tryptophan). Compensatory cavities of identical or similar size to the protuberances are created in the interface of the second polypeptide by replacing large amino acid side chains with smaller ones (e.g. alanine or threonine).

[0261] Accordingly, in a particular aspect, in the CH3 domain of the first subunit of the Fc domain of the TNF family ligand trimer-containing antigen binding molecules of the invention an amino acid residue is replaced with an amino acid residue having a larger side chain volume, thereby generating a protuberance within the CH3 domain of the first subunit which is positionable in a cavity within the CH3 domain of the second subunit, and in the CH3 domain of the second subunit of the Fc domain an amino acid residue is replaced with an amino acid residue having a smaller side chain volume, thereby generating a cavity within the CH3 domain of the second subunit within which the protuberance within the CH3 domain of the first subunit is positionable.

[0262] The protuberance and cavity can be made by altering the nucleic acid encoding the polypeptides, e.g. by site-specific mutagenesis, or by peptide synthesis.

[0263] In a specific aspect, in the CH3 domain of the first subunit of the Fc domain the threonine residue at position 366 is replaced with a tryptophan residue (T366W), and in the CH3 domain of the second subunit of the Fc domain the tyrosine residue at position 407 is replaced with a valine residue (Y407V). More particularly, in the second subunit of the Fc domain additionally the threonine residue at position 366 is replaced with a serine residue (T366S) and the leucine residue at position 368 is replaced with an alanine residue (L368A). More particularly, in the first subunit of the Fc domain additionally the serine residue at position 354 is replaced with a cysteine residue (S354C), and in the second subunit of the Fc domain additionally the tyrosine residue at position 349 is replaced by a cysteine residue (Y349C). The introduction of these two cysteine residues results in the formation of a disulfide bridge between the two subunits of the Fc domain. The disulfide bridge further stabilizes the dimer (Carter, J Immunol Methods 248, 7-15 (2001)).

[0264] Thus, in a particular aspect, the Fc domain comprises a modification promoting the association of the first and second subunit of the Fc domain. In a particular aspect, provided is a TNF family ligand trimer-containing antigen binding molecule as defined herein before, wherein the first subunit of the Fc domain comprises the amino acid substitutions S354C and T366W (numbering according to Kabat EU index) of the knob and the second subunit of the Fc domain comprises the amino acid substitutions Y349C, T366S, L368A and Y407V (numbering according to Kabat EU index) of the hole.

[0265] In an alternative aspect, a modification promoting association of the first and the second subunit of the Fc domain comprises a modification mediating electrostatic steering effects, e.g. as described in PCT publication WO 2009/089004. Generally, this method involves replacement of one or more amino acid residues at the interface of the two Fc domain subunits by charged amino acid residues so that homodimer formation becomes electrostatically unfavorable but heterodimerization electrostatically favorable.

[0266] In a further aspect, provided is a TNF family ligand trimer-containing antigen binding molecule as defined herein before, wherein the first polypeptide comprising two ectodomains of a TNF ligand family member or fragments thereof that are connected to each other by a peptide linker is fused at its N-terminus to the C-terminus of the second subunit of the Fc domain (hole) and the second polypeptide comprising one ectodomain of said TNF ligand family member or a fragment thereof is fused at its N-terminus to the C-terminus of the first subunit of the Fc domain (knob).

[0267] In another aspect, provided is a TNF family ligand trimer-containing antigen binding molecule as defined herein before, wherein the first polypeptide comprising two ectodomains of a TNF ligand family member or fragments thereof that are connected to each other by a peptide linker is fused at its N-terminus to the C-terminus of the first subunit of the Fc domain (knob) and the second polypeptide comprising one ectodomain of said TNF ligand family member or a fragment thereof is fused at its N-terminus to the C-terminus of the second subunit of the Fc domain (hole).

[0268] In one aspect, the invention provides a TNF family ligand trimer-containing antigen binding molecule, wherein the Fab domain capable of specific binding to a target cell antigen is fused at the C-terminus to the N-terminus of the first subunit of the Fc domain (knob). In another aspect, provided is a TNF family ligand trimer-containing antigen binding molecule, wherein the Fab domain capable of specific binding to a target cell antigen is fused at the C-terminus to the N-terminus of the second subunit of the Fc domain (hole).

[0269] In a particular aspect, provided is a TNF family ligand trimer-containing antigen binding molecule, wherein the Fab domain capable of specific binding to a target cell antigen is fused at the C-terminus to the N-terminus of the first subunit of the Fc domain (knob), the first polypeptide comprising two ectodomains of a TNF ligand family member or fragments thereof that are connected to each other by a peptide linker is fused at its N-terminus to the C-terminus of the second subunit of the Fc domain (hole) and the second polypeptide comprising one ectodomain of said TNF ligand family member or a fragment thereof is fused at its N-terminus to the C-terminus of the first subunit of the Fc domain (knob).

[0270] In a further aspect, the invention provides a TNF family ligand trimer-containing antigen binding molecule as defined before further comprising (d) a Fab domain that is not capable of specific binding to a target cell antigen. Thus, the invention provides a TNF family ligand trimer-containing antigen binding molecule comprising
[0271] (a) a Fab domain capable of specific binding to a target cell antigen,
[0272] (b) a Fc domain composed of a first and a second subunit capable of stable association,
[0273] (c) a first polypeptide comprising two ectodomains of a TNF ligand family member or fragments thereof that are connected to each other by a peptide linker and a second polypeptide comprising one ectodomain of said TNF ligand family member or a fragment thereof, wherein the first polypeptide is fused at its N-terminus to the C-terminus to one of the subunits of the Fc domain and wherein the second polypeptide is fused at its N-terminus to the C-terminus of the other subunit of the Fc domain, and
[0274] (d) a Fab domain that is not capable of specific binding to a target cell antigen.

[0275] These molecules comprising a Fab domain that is not capable of specific binding to a target cell antigen have a full IgG-like structure while at the same time they have the advantage of only one binding site for the target cell antigen (monovalent binding). They may thus have a better Pk profile and/or less side effects caused for instance by anti-drug antibodies.

[0276] Modifications in the CH1/CL Domains

[0277] To further improve correct pairing in antigen binding molecules comprising two different Fab domains, the TNF family ligand trimer-containing antigen binding molecules can contain different charged amino acid substitutions (so-called “charged residues”). These modifications are introduced in the crossed or non-crossed CH1 and CL domains. In a particular aspect, the invention relates to a TNF family ligand trimer-containing antigen binding molecule, wherein in one of CL domains the amino acid at position 123 (EU numbering) has been replaced by arginine (R) and the amino acid at position 124 (EU numbering) has been substituted by lysine (K) and wherein in one of the CH1 domains the amino acids at position 147 (EU numbering) and at position 213 (EU numbering) have been substituted by glutamic acid (E).

[0278] More particularly, the invention relates to a TNF family ligand trimer-containing antigen binding molecule comprising
[0279] (a) a Fab domain capable of specific binding to a target cell antigen,
[0280] (b) a Fc domain composed of a first and a second subunit capable of stable association,
[0281] (c) a first polypeptide comprising two ectodomains of a TNF ligand family member or fragments thereof that are connected to each other by a peptide linker and a second polypeptide comprising one ectodomain of said TNF ligand family member or a fragment thereof, wherein the first polypeptide is fused at its N-terminus to the C-terminus to one of the subunits of the Fc domain and wherein the second polypeptide is fused at its N-terminus to the C-terminus of the other subunit of the Fc domain, and
[0282] (d) a Fab domain that is not capable of specific binding to a target cell antigen being a crossover Fab, wherein in the CL domain the amino acid at position 123 (EU numbering) has been replaced by arginine (R) and the amino acid at position 124 (EU numbering) has been substituted by lysine (K), and wherein in the CH1 domain adjacent to the TNF ligand family member the amino acids at position 147 (EU numbering) and at position 213 (EU numbering) have been substituted by glutamic acid (E).

[0283] Particular TNF Family Ligand Trimer-Containing Antigen Binding Molecules

[0284] In one aspect, provided is a TNF family ligand trimer-containing antigen binding molecule comprising
[0285] (a) a Fab domain capable of specific binding to a target cell antigen,
[0286] (b) a Fc domain composed of a first and a second subunit capable of stable association, and
[0287] (c) a first polypeptide comprising two ectodomains of a TNF ligand family member or fragments thereof that are connected to each other by a peptide linker and a second polypeptide comprising one ectodomain of said TNF ligand family member or a fragment thereof, wherein the first polypeptide is fused at its N-terminus to the C-terminus to the second subunit of the Fc domain comprising the knob mutations and wherein the second polypeptide is fused at its N-terminus to the C-terminus of the first subunit of the Fc domain comprising the hole mutations.

[0288] In a particular aspect, the invention provides a TNF family ligand trimer-containing antigen binding molecule comprising
[0289] (a) a Fab domain capable of specific binding to a target cell antigen,
[0290] (b) a Fc domain composed of a first and a second subunit capable of stable association, and
[0291] (c) a first polypeptide comprising two ectodomains of a TNF ligand family member or fragments thereof that are connected to each other by a peptide linker and a second polypeptide comprising one ectodomain of said TNF ligand family member or a fragment thereof, wherein the first polypeptide is fused at its N-terminus to the C-terminus to the second subunit of the Fc domain comprising the knob mutations and wherein the second polypeptide is fused at its N-terminus to the C-terminus of the first subunit of the Fc domain comprising the hole mutations and wherein the VH and CH1 domain of the Fab domain capable of specific binding to a target cell antigen is fused at the C-terminus to the N-terminus of the second subunit of the Fc domain comprising the knob mutations.

[0292] In another aspect, the invention provides a TNF family ligand trimer-containing antigen binding molecule comprising
[0293] (a) a Fab domain capable of specific binding to a target cell antigen,
[0294] (b) a Fc domain composed of a first and a second subunit capable of stable association, and
[0295] (c) a first polypeptide comprising two ectodomains of a TNF ligand family member or fragments thereof that are connected to each other by a peptide linker and a second polypeptide comprising one ectodomain of said TNF ligand family member or a fragment thereof, wherein the first polypeptide is fused at its N-terminus to the C-terminus to the second subunit of the Fc domain comprising the knob mutations and wherein the second polypeptide is fused at its N-terminus to the C-terminus of the first subunit of the Fc domain comprising the hole mutations and wherein the VH and CH1 domain of the Fab domain capable of specific binding to a target cell antigen is fused at the C-terminus to the N-terminus of the first subunit of the Fc domain comprising the hole mutations.

[0296] In a further aspect, provided is a TNF family ligand trimer-containing antigen binding molecule comprising
[0297] (a) a Fab domain capable of specific binding to a target cell antigen,
[0298] (b) a Fc domain composed of a first and a second subunit capable of stable association, and
[0299] (c) a first polypeptide comprising two ectodomains of a TNF ligand family member or fragments thereof that are connected to each other by a peptide linker and a second polypeptide comprising one ectodomain of said TNF ligand family member or a fragment thereof, wherein the first polypeptide is fused at its N-terminus to the C-terminus to the first subunit of the Fc domain comprising the hole mutations and wherein the second polypeptide is fused at its N-terminus to the C-terminus of the second subunit of the Fc domain comprising the knob mutations.

[0300] In a particular aspect, the invention provides a TNF family ligand trimer-containing antigen binding molecule comprising
[0301] (a) a Fab domain capable of specific binding to a target cell antigen,
[0302] (b) a Fc domain composed of a first and a second subunit capable of stable association, and
[0303] (c) a first polypeptide comprising two ectodomains of a TNF ligand family member or fragments thereof that are connected to each other by a peptide linker and a second polypeptide comprising one ectodomain of said TNF ligand family member or a fragment thereof, wherein the first polypeptide is fused at its N-terminus to the C-terminus to the first subunit of the Fc domain comprising the hole mutations and wherein the second polypeptide is fused at its N-terminus to the C-terminus of the second subunit of the Fc domain comprising the knob mutations and wherein the VH and CH1 domain of the Fab domain capable of specific binding to a target cell antigen is fused at the C-terminus to the N-terminus of the second subunit of the Fc domain comprising the knob mutations.

[0304] In another aspect, the invention provides a TNF family ligand trimer-containing antigen binding molecule comprising
[0305] (a) a Fab domain capable of specific binding to a target cell antigen,
[0306] (b) a Fc domain composed of a first and a second subunit capable of stable association, and
[0307] (c) a first polypeptide comprising two ectodomains of a TNF ligand family member or fragments thereof that are connected to each other by a peptide linker and a second polypeptide comprising one ectodomain of said TNF ligand family member or a fragment thereof, wherein the first polypeptide is fused at its N-terminus to the C-terminus to the first subunit of the Fc domain comprising the hole mutations and wherein the second polypeptide is fused at its N-terminus to the C-terminus of the second subunit of the Fc domain comprising the knob mutations and wherein the VH and CH1 domain of the Fab domain capable of specific binding to a target cell antigen is fused at the C-terminus to the N-terminus of the first subunit of the Fc domain comprising the hole mutations.

[0308] TNF Family Ligand Trimer-Containing Antigen Binding Molecules, wherein the Target Cell Antigen is FAP

[0309] In one aspect, provided is a TNF family ligand trimer-containing antigen binding molecule, wherein the target cell antigen is Fibroblast Activation Protein (FAP).

[0310] In a particular aspect, provided is a TNF family ligand trimer-containing antigen binding molecule as defined herein before, wherein the Fab domain capable of specific binding to FAP comprises a heavy chain variable region comprising an amino acid sequence that is at least about 95%, 96%, 97%, 98%, 99% or 100% identical to the amino acid sequence of SEQ ID NO:25 and a light chain variable region comprising an amino acid sequence that is at least about 95%, 96%, 97%, 98%, 99% or 100% identical to the amino acid sequence of SEQ ID NO:26.

[0311] In another particular aspect, provided is a TNF family ligand trimer-containing antigen binding molecule as defined herein before, wherein the Fab domain capable of specific binding to FAP comprises a heavy chain variable region comprising an amino acid sequence that is at least about 95%, 96%, 97%, 98%, 99% or 100% identical to the amino acid sequence of SEQ ID NO:27 and a light chain variable region comprising an amino acid sequence that is at least about 95%, 96%, 97%, 98%, 99% or 100% identical to the amino acid sequence of SEQ ID NO:28.

[0312] In one aspect, the Fab domain capable of specific binding to FAP comprises a heavy chain variable region comprising an amino acid sequence of SEQ ID NO:25 and a light chain variable region comprising an amino acid sequence of SEQ ID NO:26 or a heavy chain variable region comprising an amino acid sequence of SEQ ID NO:27 and a light chain variable region comprising an amino acid sequence of SEQ ID NO:28. In a particular aspect, the Fab domain capable of specific binding to FAP comprises a heavy chain variable region comprising the amino acid sequence of SEQ ID NO:25 and a light chain variable region comprising the amino acid sequence of SEQ ID NO:26. In another particular aspect, the Fab domain capable of specific binding to FAP comprises a heavy chain variable region comprising the amino acid sequence of SEQ ID NO:27 and a light chain variable region comprising the amino acid sequence of SEQ ID NO:28. In a specific aspect, the Fab domain capable of specific binding to FAP comprises a VH domain consisting of amino acid sequence of SEQ ID NO:27 and a VL domain consisting of the amino acid sequence of SEQ ID NO:28.

[0313] In a further aspect, the invention provides a TNF family ligand trimer-containing antigen binding molecule comprising
[0314] (a) a Fab domain capable of specific binding to FAP comprising a VH domain comprising an amino acid sequence of SEQ ID NO:25 and a VL domain comprising an amino acid sequence of SEQ ID NO:26, or a VH domain comprising an amino acid sequence of SEQ ID NO:27 and a VL domain comprising an amino acid sequence of SEQ ID NO:28,
[0315] (b) a Fc domain composed of a first and a second subunit capable of stable association, and
[0316] (c) a first polypeptide comprising two ectodomains of a TNF ligand family member or fragments thereof that are connected to each other by a peptide linker and a second polypeptide comprising one ectodomain of said TNF ligand family member or a fragment thereof, wherein the first polypeptide is fused at its N-terminus to the C-terminus to one of the subunits of the Fc domain and wherein the second polypeptide is fused at its N-terminus to the C-terminus of the other subunit of the Fc domain.

[0317] In another aspect, the invention provides a TNF family ligand trimer-containing antigen binding molecule comprising
[0318] (a) a Fab domain capable of specific binding to FAP comprising a VH domain comprising an amino acid sequence of SEQ ID NO:25 and a VL domain comprising an amino acid sequence of SEQ ID NO:26, or a VH domain comprising an amino acid sequence of SEQ ID NO:27 and a VL domain comprising an amino acid sequence of SEQ ID NO:28,
[0319] (b) a Fc domain composed of a first and a second subunit capable of stable association, and
[0320] (c) a first polypeptide comprising two ectodomains of a TNF ligand family member or fragments thereof that are connected to each other by a peptide linker and a second polypeptide comprising one ectodomain of said TNF ligand family member or a fragment thereof, wherein the first polypeptide is fused at its N-terminus to the C-terminus to one of the subunits of the Fc domain and wherein the second polypeptide is fused at its N-terminus to the C-terminus of the other subunit of the Fc domain and wherein the first polypeptide comprising two ectodomains of a TNF ligand family member or fragments thereof comprises an amino acid sequence selected from the group consisting of SEQ ID NO:9 and SEQ ID NO:10 and the second polypeptide comprising one ectodomain of said TNF ligand family member or a fragment thereof comprises the amino acid sequence selected from the group consisting of SEQ ID NO:1 and SEQ ID NO:5.

[0321] In a particular aspect, provided is a TNF family ligand trimer-containing antigen binding molecule comprising
[0322] (a) a Fab domain capable of specific binding to FAP comprising a VH domain comprising an amino acid sequence of SEQ ID NO:27 and a VL domain comprising an amino acid sequence of SEQ ID NO:28,
[0323] (b) a Fc domain composed of a first and a second subunit capable of stable association, and
[0324] (c) a first polypeptide comprising two ectodomains of a TNF ligand family member or fragments thereof that are connected to each other by a peptide linker and a second polypeptide comprising one ectodomain of said TNF ligand family member or a fragment thereof, wherein the first polypeptide is fused at its N-terminus to the C-terminus to one of the subunits of the Fc domain and wherein the second polypeptide is fused at its N-terminus to the C-terminus of the other subunit of the Fc domain and wherein the first polypeptide comprising two ectodomains of a TNF ligand family member comprising an amino acid sequence of SEQ ID NO:10 and the second polypeptide comprising one ectodomain of said TNF ligand family member comprising the amino acid sequence of SEQ ID NO:5.

[0325] In another aspect, provided is a TNF family ligand trimer-containing antigen binding molecule, wherein the antigen binding molecule comprises
[0326] (i) a light chain comprising the VL domain of the Fab domain capable of specific binding to FAP,
[0327] (ii) a fusion polypeptide comprising a first subunit of a Fc domain and a first polypeptide comprising two ectodomains of a TNF ligand family member or fragments thereof that are connected to each other by a peptide linker, wherein the first polypeptide is fused at its N-terminus to the C-terminus of the first subunit of the Fc domain, and
[0328] (iii) a heavy chain comprising the VH domain of the Fab domain capable of specific binding to FAP, a second subunit of the Fc domain and a second polypeptide comprising one ectodomain of said TNF ligand family member or a fragment thereof, wherein the variable heavy chain of the Fab domain capable of specific binding to FAP is fused at its C-terminus to the N-terminus of the second subunit of the Fc domain and wherein the second polypeptide comprising one ectodomain of said TNF ligand family member or a fragment thereof is fused at its N-terminus to the C-terminus of the second subunit of the Fc domain.

[0329] In a particular aspect, provided is a TNF family ligand trimer-containing antigen binding molecule, wherein the antigen binding molecule comprises
[0330] (i) a light chain comprising an amino acid sequence that is at least about 95%, 96%, 97%, 98%, 99% or 100% identical to the amino acid sequence of SEQ ID NO:106,
[0331] (ii) a fusion polypeptide comprising an amino acid sequence that is at least about 95%, 96%, 97%, 98%, 99% or 100% identical to the amino acid sequence of SEQ ID NO:104, and
[0332] (iii) a heavy chain comprising an amino acid sequence that is at least about 95%, 96%, 97%, 98%, 99% or 100% identical to the amino acid sequence of SEQ ID NO:105.

[0333] More particularly, the TNF family ligand trimer-containing antigen binding molecule comprises (i) a light chain comprising the amino acid sequence of SEQ ID NO:106, (ii) a fusion polypeptide comprising the amino acid sequence of SEQ ID NO:104, and (iii) a heavy chain comprising the amino acid sequence of SEQ ID NO:105.

[0334] In another particular aspect, provided is a TNF family ligand trimer-containing antigen binding molecule, wherein the antigen binding molecule comprises
[0335] (i) a light chain comprising an amino acid sequence that is at least about 95%, 96%, 97%, 98%, 99% or 100% identical to the amino acid sequence of SEQ ID NO:114,
[0336] (ii) a fusion polypeptide comprising an amino acid sequence that is at least about 95%, 96%, 97%, 98%, 99% or 100% identical to the amino acid sequence of SEQ ID NO:104, and
[0337] (iii) a heavy chain comprising an amino acid sequence that is at least about 95%, 96%, 97%, 98%, 99% or 100% identical to the amino acid sequence of SEQ ID NO:113.

[0338] More particularly, the TNF family ligand trimer-containing antigen binding molecule comprises (i) a light chain comprising the amino acid sequence of SEQ ID NO:114, (ii) a fusion polypeptide comprising the amino acid sequence of SEQ ID NO:104, and (iii) a heavy chain comprising the amino acid sequence of SEQ ID NO:113.

[0339] In a further aspect, provided is a TNF family ligand trimer-containing antigen binding molecule, wherein the antigen binding molecule comprises
[0340] (i) a light chain comprising an amino acid sequence that is at least about 95%, 96%, 97%, 98%, 99% or 100% identical to the amino acid sequence of SEQ ID NO:106,
[0341] (ii) a fusion polypeptide comprising an amino acid sequence that is at least about 95%, 96%, 97%, 98%, 99% or 100% identical to the amino acid sequence of SEQ ID NO:178, and
[0342] (iii) a heavy chain comprising an amino acid sequence that is at least about 95%, 96%, 97%, 98%, 99% or 100% identical to the amino acid sequence of SEQ ID NO:177.

[0343] More particularly, the TNF family ligand trimer-containing antigen binding molecule comprises (i) a light chain comprising the amino acid sequence of SEQ ID NO:106, (ii) a fusion polypeptide comprising the amino acid sequence of SEQ ID NO:178, and (iii) a heavy chain comprising the amino acid sequence of SEQ ID NO:177.

[0344] In yet another aspect, provided is a TNF family ligand trimer-containing antigen binding molecule, wherein the antigen binding molecule comprises
[0345] (i) a light chain comprising an amino acid sequence that is at least about 95%, 96%, 97%, 98%, 99% or 100% identical to the amino acid sequence of SEQ ID NO:114,
[0346] (ii) a fusion polypeptide comprising an amino acid sequence that is at least about 95%, 96%, 97%, 98%, 99% or 100% identical to the amino acid sequence of SEQ ID NO:178, and
[0347] (iii) a heavy chain comprising an amino acid sequence that is at least about 95%, 96%, 97%, 98%, 99% or 100% identical to the amino acid sequence of SEQ ID NO:182.

[0348] More particularly, the TNF family ligand trimer-containing antigen binding molecule comprises (i) a light chain comprising the amino acid sequence of SEQ ID NO:114, (ii) a fusion polypeptide comprising the amino acid sequence of SEQ ID NO:178, and (iii) a heavy chain comprising the amino acid sequence of SEQ ID NO:182.

[0349] In another aspect, provided is a TNF family ligand trimer-containing antigen binding molecule, wherein the antigen binding molecule comprises
[0350] (i) a light chain comprising the VL domain of the Fab domain capable of specific binding to FAP,
[0351] (ii) a fusion polypeptide comprising a first subunit of a Fc domain and a second polypeptide comprising one ectodomain of said TNF ligand family member or a fragment thereof, wherein the second polypeptide is fused at its N-terminus to the C-terminus of the first subunit of the Fc domain, and
[0352] (iii) a heavy chain comprising the VH domain of the Fab domain capable of specific binding to FAP, a second subunit of the Fc domain and and a first polypeptide comprising two ectodomains of a TNF ligand family member or fragments thereof that are connected to each other by a peptide linker, wherein the variable heavy chain of the Fab domain capable of specific binding to FAP is fused at its C-terminus to the N-terminus of the second subunit of the Fc domain and wherein the first polypeptide comprising two ectodomains of a TNF ligand family member or fragments thereof is fused at its N-terminus to the C-terminus of the second subunit of the Fc domain.

[0353] In a particular aspect, provided is a TNF family ligand trimer-containing antigen binding molecule, wherein the antigen binding molecule comprises
[0354] (i) a light chain comprising an amino acid sequence that is at least about 95%, 96%, 97%, 98%, 99% or 100% identical to the amino acid sequence of SEQ ID NO:106,
[0355] (ii) a fusion polypeptide comprising an amino acid sequence that is at least about 95%, 96%, 97%, 98%, 99% or 100% identical to the amino acid sequence of SEQ ID NO:109, and
[0356] (iii) a heavy chain comprising an amino acid sequence that is at least about 95%, 96%, 97%, 98%, 99% or 100% identical to the amino acid sequence of SEQ ID NO:110.

[0357] More particularly, the TNF family ligand trimer-containing antigen binding molecule comprises (i) a light chain comprising the amino acid sequence of SEQ ID NO:106, (ii) a fusion polypeptide comprising the amino acid sequence of SEQ ID NO:109, and (iii) a heavy chain comprising the amino acid sequence of SEQ ID NO:110.

[0358] In another particular aspect, provided is a TNF family ligand trimer-containing antigen binding molecule, wherein the antigen binding molecule comprises
[0359] (i) a light chain comprising an amino acid sequence that is at least about 95%, 96%, 97%, 98%, 99% or 100% identical to the amino acid sequence of SEQ ID NO:114,
[0360] (ii) a fusion polypeptide comprising an amino acid sequence that is at least about 95%, 96%, 97%, 98%, 99% or 100% identical to the amino acid sequence of SEQ ID NO:109, and
[0361] (iii) a heavy chain comprising an amino acid sequence that is at least about 95%, 96%, 97%, 98%, 99% or 100% identical to the amino acid sequence of SEQ ID NO:116.

[0362] More particularly, the TNF family ligand trimer-containing antigen binding molecule comprises (i) a light chain comprising the amino acid sequence of SEQ ID NO:114, (ii) a fusion polypeptide comprising the amino acid sequence of SEQ ID NO:109, and (iii) a heavy chain comprising the amino acid sequence of SEQ ID NO:116.

[0363] In a particular aspect, provided is a TNF family ligand trimer-containing antigen binding molecule, wherein the antigen binding molecule comprises
[0364] (i) a light chain comprising an amino acid sequence that is at least about 95%, 96%, 97%, 98%, 99% or 100% identical to the amino acid sequence of SEQ ID NO:106,
[0365] (ii) a fusion polypeptide comprising an amino acid sequence that is at least about 95%, 96%, 97%, 98%, 99% or 100% identical to the amino acid sequence of SEQ ID NO:174, and
[0366] (iii) a heavy chain comprising an amino acid sequence that is at least about 95%, 96%, 97%, 98%, 99% or 100% identical to the amino acid sequence of SEQ ID NO:173.

[0367] More particularly, the TNF family ligand trimer-containing antigen binding molecule comprises (i) a light chain comprising the amino acid sequence of SEQ ID NO:106, (ii) a fusion polypeptide comprising the amino acid sequence of SEQ ID NO:174, and (iii) a heavy chain comprising the amino acid sequence of SEQ ID NO:173.

[0368] In another particular aspect, provided is a TNF family ligand trimer-containing antigen binding molecule, wherein the antigen binding molecule comprises
[0369] (i) a light chain comprising an amino acid sequence that is at least about 95%, 96%, 97%, 98%, 99% or 100% identical to the amino acid sequence of SEQ ID NO:114,
[0370] (ii) a fusion polypeptide comprising an amino acid sequence that is at least about 95%, 96%, 97%, 98%, 99% or 100% identical to the amino acid sequence of SEQ ID NO:174, and
[0371] (iii) a heavy chain comprising an amino acid sequence that is at least about 95%, 96%, 97%, 98%, 99% or 100% identical to the amino acid sequence of SEQ ID NO:180.

[0372] More particularly, the TNF family ligand trimer-containing antigen binding molecule comprises (i) a light chain comprising the amino acid sequence of SEQ ID NO:114, (ii) a fusion polypeptide comprising the amino acid sequence of SEQ ID NO:174, and (iii) a heavy chain comprising the amino acid sequence of SEQ ID NO:180.

[0373] In a further aspect, provided is a TNF family ligand trimer-containing antigen binding molecule, wherein the antigen binding molecule comprises
[0374] (i) a first light chain comprising the VL domain of the Fab domain capable of specific binding to FAP,
[0375] (ii) a first heavy chain comprising the VH domain of the Fab domain capable of specific binding to FAP, a first subunit of a Fc domain and a second polypeptide comprising one ectodomain of said TNF ligand family member or a fragment thereof, wherein the variable heavy chain of the Fab domain capable of specific binding to FAP is fused at its C-terminus to the N-terminus of the second subunit of the Fc domain and wherein the second polypeptide is fused at its N-terminus to the C-terminus of the first subunit of the Fc domain,
[0376] (iii) a second heavy chain comprising the VH domain of a Fab domain that is not capable of specific binding to a target cell antigen, a second subunit of the Fc domain and and a first polypeptide comprising two ectodomains of a TNF ligand family member or fragments thereof that are connected to each other by a peptide linker, wherein the variable heavy chain of the Fab domain not capable of specific binding to a target cell antigen is fused at its C-terminus to the N-terminus of the second subunit of the Fc domain and wherein the first polypeptide comprising two ectodomains of a TNF ligand family member or fragments thereof is fused at its N-terminus to the C-terminus of the second subunit of the Fc domain, and
[0377] (iv) a second light chain comprising the VL domain of the Fab domain that is not capable of specific binding to a target cell antigen.

[0378] In a particular aspect, provided is a TNF family ligand trimer-containing antigen binding molecule, wherein the antigen binding molecule comprises
[0379] (i) a first light chain comprising an amino acid sequence that is at least about 95%, 96%, 97%, 98%, 99% or 100% identical to the amino acid sequence of SEQ ID NO:106,
[0380] (ii) a first heavy chain comprising an amino acid sequence that is at least about 95%, 96%, 97%, 98%, 99% or 100% identical to the amino acid sequence of SEQ ID NO:217,
[0381] (iii) a second heavy chain comprising an amino acid sequence that is at least about 95%, 96%, 97%, 98%, 99% or 100% identical to the amino acid sequence of SEQ ID NO:218, and
[0382] (iv) a second light chain comprising an amino acid sequence that is at least about 95%, 96%, 97%, 98%, 99% or 100% identical to the amino acid sequence of SEQ ID NO:214.

[0383] More particularly, the TNF family ligand trimer-containing antigen binding molecule comprises (i) a first light chain comprising the amino acid sequence of SEQ ID NO:106, (ii) a first heavy chain comprising the amino acid sequence of SEQ ID NO:217, (iii) a second heavy chain comprising the amino acid sequence of SEQ ID NO:218, and (iv) a second light chain comprising the amino acid sequence of SEQ ID NO:214.

[0384] In another particular aspect, provided is a TNF family ligand trimer-containing antigen binding molecule, wherein the antigen binding molecule comprises
[0385] (i) a light chain comprising an amino acid sequence that is at least about 95%, 96%, 97%, 98%, 99% or 100% identical to the amino acid sequence of SEQ ID NO:106,
[0386] (ii) a first heavy chain comprising an amino acid sequence that is at least about 95%, 96%, 97%, 98%, 99% or 100% identical to the amino acid sequence of SEQ ID NO:222,
[0387] (iii) a second heavy chain comprising an amino acid sequence that is at least about 95%, 96%, 97%, 98%, 99% or 100% identical to the amino acid sequence of SEQ ID NO:221, and
[0388] (iv) a second light chain comprising an amino acid sequence that is at least about 95%, 96%, 97%, 98%, 99% or 100% identical to the amino acid sequence of SEQ ID NO:214.

[0389] More particularly, the TNF family ligand trimer-containing antigen binding molecule comprises (i) a first light chain comprising the amino acid sequence of SEQ ID NO:106, (ii) a first heavy chain comprising the amino acid sequence of SEQ ID NO:222, (iii) a second heavy chain comprising the amino acid sequence of SEQ ID NO:221, and (iv) a second light chain comprising the amino acid sequence of SEQ ID NO:214.

[0390] In another aspect, provided is a TNF family ligand trimer-containing antigen binding molecule, wherein the antigen binding molecule comprises
[0391] (i) a first light chain comprising the VL domain of the Fab domain capable of specific binding to FAP,
[0392] (ii) a first heavy chain comprising the VH domain of the Fab domain capable of specific binding to FAP, a first subunit of a Fc domain and and a first polypeptide comprising two ectodomains of a TNF ligand family member or fragments thereof that are connected to each other by a peptide linker, wherein the variable heavy chain of the Fab domain capable of specific binding to FAP is fused at its C-terminus to the N-terminus of the second subunit of the Fc domain and wherein the first polypeptide comprising ectodomains of a TNF ligand family member or fragments thereof is fused at its N-terminus to the C-terminus of the first subunit of the Fc domain,
[0393] (iii) a second heavy chain comprising the VH domain of a Fab domain that is not capable of specific binding to a target cell antigen, a second subunit of the Fc domain and and a second polypeptide comprising one ectodomain of said TNF ligand family member or a fragment thereof, wherein the variable heavy chain of the Fab domain not capable of specific binding to a target cell antigen is fused at its C-terminus to the N-terminus of the second subunit of the Fc domain and wherein the second polypeptide comprising one ectodomain of a TNF ligand family member or fragments thereof is fused at its N-terminus to the C-terminus of the second subunit of the Fc domain, and
[0394] (iv) a second light chain comprising the VL domain of the Fab domain that is not capable of specific binding to a target cell antigen.

[0395] In a particular aspect, provided is a TNF family ligand trimer-containing antigen binding molecule, wherein the antigen binding molecule comprises
[0396] (i) a first light chain comprising an amino acid sequence that is at least about 95%, 96%, 97%, 98%, 99% or 100% identical to the amino acid sequence of SEQ ID NO:106,
[0397] (ii) a first heavy chain comprising an amino acid sequence that is at least about 95%, 96%, 97%, 98%, 99% or 100% identical to the amino acid sequence of SEQ ID NO:212,
[0398] (iii) a second heavy chain comprising an amino acid sequence that is at least about 95%, 96%, 97%, 98%, 99% or 100% identical to the amino acid sequence of SEQ ID NO:213, and
[0399] (iv) a second light chain comprising an amino acid sequence that is at least about 95%, 96%, 97%, 98%, 99% or 100% identical to the amino acid sequence of SEQ ID NO:214.

[0400] More particularly, the TNF family ligand trimer-containing antigen binding molecule comprises (i) a first light chain comprising the amino acid sequence of SEQ ID NO:106, (ii) a first heavy chain comprising the amino acid sequence of SEQ ID NO:212, (iii) a second heavy chain comprising the amino acid sequence of SEQ ID NO:213, and (iv) a second light chain comprising the amino acid sequence of SEQ ID NO:214.

[0401] In another particular aspect, provided is a TNF family ligand trimer-containing antigen binding molecule, wherein the antigen binding molecule comprises
[0402] (i) a light chain comprising an amino acid sequence that is at least about 95%, 96%, 97%, 98%, 99% or 100% identical to the amino acid sequence of SEQ ID NO:106,
[0403] (ii) a first heavy chain comprising an amino acid sequence that is at least about 95%, 96%, 97%, 98%, 99% or 100% identical to the amino acid sequence of SEQ ID NO:226,
[0404] (iii) a second heavy chain comprising an amino acid sequence that is at least about 95%, 96%, 97%, 98%, 99% or 100% identical to the amino acid sequence of SEQ ID NO:225, and
[0405] (iv) a second light chain comprising an amino acid sequence that is at least about 95%, 96%, 97%, 98%, 99% or 100% identical to the amino acid sequence of SEQ ID NO:214.

[0406] More particularly, the TNF family ligand trimer-containing antigen binding molecule comprises (i) a first light chain comprising the amino acid sequence of SEQ ID NO:106, (ii) a first heavy chain comprising the amino acid sequence of SEQ ID NO:226, (iii) a second heavy chain comprising the amino acid sequence of SEQ ID NO:225, and (iv) a second light chain comprising the amino acid sequence of SEQ ID NO:214.

[0407] TNF Family Ligand Trimer-Containing Antigen Binding Molecules, wherein the Target Cell Antigen is CD19

[0408] In one aspect, provided is a TNF family ligand trimer-containing antigen binding molecule, wherein the target cell antigen is CD19.

[0409] In a particular aspect, provided is a TNF family ligand trimer-containing antigen binding molecule as defined herein before, wherein the Fab domain capable of specific binding to CD19 comprises a heavy chain variable region comprising an amino acid sequence that is at least about 95%, 96%, 97%, 98%, 99% or 100% identical to the amino acid sequence of SEQ ID NO:41 and a light chain variable region comprising an amino acid sequence that is at least about 95%, 96%, 97%, 98%, 99% or 100% identical to the amino acid sequence of SEQ ID NO:42.

[0410] In another particular aspect, provided is a TNF family ligand trimer-containing antigen binding molecule as defined herein before, wherein the Fab domain capable of specific binding to CD19 comprises a heavy chain variable region comprising an amino acid sequence that is at least about 95%, 96%, 97%, 98%, 99% or 100% identical to the amino acid sequence of SEQ ID NO:43 and a light chain variable region comprising an amino acid sequence that is at least about 95%, 96%, 97%, 98%, 99% or 100% identical to the amino acid sequence of SEQ ID NO:44.

[0411] In one aspect, the Fab domain capable of specific binding to CD19 comprises a variable heavy chain comprising an amino acid sequence of SEQ ID NO:41 and a variable light chain comprising an amino acid sequence of SEQ ID NO:42 or a variable heavy chain comprising an amino acid sequence of SEQ ID NO:43 and a variable light chain comprising an amino acid sequence of SEQ ID NO:44. In a particular aspect, the Fab domain capable of specific binding to FAP comprises a heavy chain variable region comprising the amino acid sequence of SEQ ID NO:41 and a light chain variable region comprising the amino acid sequence of SEQ ID NO:42. In another particular aspect, the Fab domain capable of specific binding to FAP comprises a heavy chain variable region comprising the amino acid sequence of SEQ ID NO:43 and a light chain variable region comprising the amino acid sequence of SEQ ID NO:44. In a specific aspect, the Fab domain capable of specific binding to FAP comprises a VH domain consisting of amino acid sequence of SEQ ID NO:43 and a VL domain consisting of the amino acid sequence of SEQ ID NO:44.

[0412] In a further aspect, the invention provides a TNF family ligand trimer-containing antigen binding molecule comprising
[0413] (a) a Fab domain capable of specific binding to CD19 comprising a VH domain comprising an amino acid sequence of SEQ ID NO:41 and a VL domain comprising an amino acid sequence of SEQ ID NO:42, or a VH domain comprising an amino acid sequence of SEQ ID NO:43 and a VL domain comprising an amino acid sequence of SEQ ID NO:44,
[0414] (b) a Fc domain composed of a first and a second subunit capable of stable association, and
[0415] (c) a first polypeptide comprising two ectodomains of a TNF ligand family member or fragments thereof that are connected to each other by a peptide linker and a second polypeptide comprising one ectodomain of said TNF ligand family member or a fragment thereof, wherein the first polypeptide is fused at its N-terminus to the C-terminus to one of the subunits of the Fc domain and wherein the second polypeptide is fused at its N-terminus to the C-terminus of the other subunit of the Fc domain.

[0416] In another aspect, the invention provides a TNF family ligand trimer-containing antigen binding molecule comprising
[0417] (a) a Fab domain capable of specific binding to CD19 comprising a VH domain comprising an amino acid sequence of SEQ ID NO:41 and a VL domain comprising an amino acid sequence of SEQ ID NO:42, or a VH domain comprising an amino acid sequence of SEQ ID NO:43 and a VL domain comprising an amino acid sequence of SEQ ID NO:44,
[0418] (b) a Fc domain composed of a first and a second subunit capable of stable association, and
[0419] (c) a first polypeptide comprising two ectodomains of a TNF ligand family member or fragments thereof that are connected to each other by a peptide linker and a second polypeptide comprising one ectodomain of said TNF ligand family member or a fragment thereof, wherein the first polypeptide is fused at its N-terminus to the C-terminus to one of the subunits of the Fc domain and wherein the second polypeptide is fused at its N-terminus to the C-terminus of the other subunit of the Fc domain and wherein the first polypeptide comprising two ectodomains of a TNF ligand family member or fragments thereof comprises an amino acid sequence selected from the group consisting of SEQ ID NO:9 and SEQ ID NO:10 and the second polypeptide comprising one ectodomain of said TNF ligand family member or a fragment thereof comprises the amino acid sequence selected from the group consisting of SEQ ID NO:1 and SEQ ID NO:5.

[0420] In a particular aspect, provided is a TNF family ligand trimer-containing antigen binding molecule comprising
[0421] (a) a Fab domain capable of specific binding to CD19 comprising a VH domain comprising an amino acid sequence of SEQ ID NO:43 and a VL domain comprising an amino acid sequence of SEQ ID NO:44,
[0422] (b) a Fc domain composed of a first and a second subunit capable of stable association, and
[0423] (c) a first polypeptide comprising two ectodomains of a TNF ligand family member or fragments thereof that are connected to each other by a peptide linker and a second polypeptide comprising one ectodomain of said TNF ligand family member or a fragment thereof, wherein the first polypeptide is fused at its N-terminus to the C-terminus to one of the subunits of the Fc domain and wherein the second polypeptide is fused at its N-terminus to the C-terminus of the other subunit of the Fc domain and wherein the first polypeptide comprising two ectodomains of a TNF ligand family member comprising an amino acid sequence of SEQ ID NO:10 and the second polypeptide comprising one ectodomain of said TNF ligand family member comprising the amino acid sequence of SEQ ID NO:5.

[0424] In another aspect, provided is a TNF family ligand trimer-containing antigen binding molecule, wherein the antigen binding molecule comprises
[0425] (i) a light chain comprising the variable light chain of the Fab domain capable of specific binding to CD19,
[0426] (ii) a fusion polypeptide comprising a first subunit of a Fc domain and a first polypeptide comprising two ectodomains of a TNF ligand family member or fragments thereof that are connected to each other by a peptide linker, wherein the first polypeptide is fused at its N-terminus to the C-terminus of the first subunit of the Fc domain, and
[0427] (iii) a heavy chain comprising the variable heavy chain of the Fab domain capable of specific binding to CD19, a second subunit of the Fc domain and a second polypeptide comprising one ectodomain of said TNF ligand family member or a fragment thereof, wherein the variable heavy chain of the Fab domain capable of specific binding to CD19 is fused at its C-terminus to the N-terminus of the second subunit of the Fc domain and wherein the second polypeptide comprising one ectodomain of said TNF ligand family member or a fragment thereof is fused at its N-terminus to the C-terminus of the second subunit of the Fc domain.

[0428] In a particular aspect, provided is a TNF family ligand trimer-containing antigen binding molecule, wherein the antigen binding molecule comprises
[0429] (i) a light chain comprising an amino acid sequence that is at least about 95%, 96%, 97%, 98%, 99% or 100% identical to the amino acid sequence of SEQ ID NO:120,
[0430] (ii) a fusion polypeptide comprising an amino acid sequence that is at least about 95%, 96%, 97%, 98%, 99% or 100% identical to the amino acid sequence of SEQ ID NO:104, and
[0431] (iii) a heavy chain comprising an amino acid sequence that is at least about 95%, 96%, 97%, 98%, 99% or 100% identical to the amino acid sequence of SEQ ID NO:119.

[0432] More particularly, the TNF family ligand trimer-containing antigen binding molecule comprises (i) a light chain comprising the amino acid sequence of SEQ ID NO:120, (ii) a fusion polypeptide comprising the amino acid sequence of SEQ ID NO:104, and (iii) a heavy chain comprising the amino acid sequence of SEQ ID NO:119.

[0433] In another particular aspect, provided is a TNF family ligand trimer-containing antigen binding molecule, wherein the antigen binding molecule comprises
[0434] (i) a light chain comprising an amino acid sequence that is at least about 95%, 96%, 97%, 98%, 99% or 100% identical to the amino acid sequence of SEQ ID NO:126,
[0435] (ii) a fusion polypeptide comprising an amino acid sequence that is at least about 95%, 96%, 97%, 98%, 99% or 100% identical to the amino acid sequence of SEQ ID NO:104, and
[0436] (iii) a heavy chain comprising an amino acid sequence that is at least about 95%, 96%, 97%, 98%, 99% or 100% identical to the amino acid sequence of SEQ ID NO:125.

[0437] More particularly, the TNF family ligand trimer-containing antigen binding molecule comprises (i) a light chain comprising the amino acid sequence of SEQ ID NO:126, (ii) a fusion polypeptide comprising the amino acid sequence of SEQ ID NO:174, and (iii) a heavy chain comprising the amino acid sequence of SEQ ID NO:125.

[0438] In a further aspect, provided is a TNF family ligand trimer-containing antigen binding molecule, wherein the antigen binding molecule comprises
[0439] (i) a light chain comprising an amino acid sequence that is at least about 95%, 96%, 97%, 98%, 99% or 100% identical to the amino acid sequence of SEQ ID NO:120,
[0440] (ii) a fusion polypeptide comprising an amino acid sequence that is at least about 95%, 96%, 97%, 98%, 99% or 100% identical to the amino acid sequence of SEQ ID NO:178, and
[0441] (iii) a heavy chain comprising an amino acid sequence that is at least about 95%, 96%, 97%, 98%, 99% or 100% identical to the amino acid sequence of SEQ ID NO:186.

[0442] More particularly, the TNF family ligand trimer-containing antigen binding molecule comprises (i) a light chain comprising the amino acid sequence of SEQ ID NO:120, (ii) a fusion polypeptide comprising the amino acid sequence of SEQ ID NO:178, and (iii) a heavy chain comprising the amino acid sequence of SEQ ID NO:186.

[0443] In yet another aspect, provided is a TNF family ligand trimer-containing antigen binding molecule, wherein the antigen binding molecule comprises
[0444] (i) a light chain comprising an amino acid sequence that is at least about 95%, 96%, 97%, 98%, 99% or 100% identical to the amino acid sequence of SEQ ID NO:126,
[0445] (ii) a fusion polypeptide comprising an amino acid sequence that is at least about 95%, 96%, 97%, 98%, 99% or 100% identical to the amino acid sequence of SEQ ID NO:178, and
[0446] (iii) a heavy chain comprising an amino acid sequence that is at least about 95%, 96%, 97%, 98%, 99% or 100% identical to the amino acid sequence of SEQ ID NO:190.

[0447] More particularly, the TNF family ligand trimer-containing antigen binding molecule comprises (i) a light chain comprising the amino acid sequence of SEQ ID NO:126, (ii) a fusion polypeptide comprising the amino acid sequence of SEQ ID NO:178, and (iii) a heavy chain comprising the amino acid sequence of SEQ ID NO:190.

[0448] In another aspect, provided is a TNF family ligand trimer-containing antigen binding molecule, wherein the antigen binding molecule comprises
[0449] (i) a light chain comprising the variable light chain of the Fab domain capable of specific binding to CD19,
[0450] (ii) a fusion polypeptide comprising a first subunit of a Fc domain and a second polypeptide comprising one ectodomain of said TNF ligand family member or a fragment thereof, wherein the second polypeptide is fused at its N-terminus to the C-terminus of the first subunit of the Fc domain, and
[0451] (iii) a heavy chain comprising the variable heavy chain of the Fab domain capable of specific binding to CD19, a second subunit of the Fc domain and and a first polypeptide comprising two ectodomains of a TNF ligand family member or fragments thereof that are connected to each other by a peptide linker, wherein the variable heavy chain of the Fab domain capable of specific binding to CD19 is fused at its C-terminus to the N-terminus of the second subunit of the Fc domain and wherein the first polypeptide comprising two ectodomains of a TNF ligand family member or fragments thereof is fused at its N-terminus to the C-terminus of the second subunit of the Fc domain.

[0452] In a particular aspect, provided is a TNF family ligand trimer-containing antigen binding molecule, wherein the antigen binding molecule comprises
[0453] (i) a light chain comprising an amino acid sequence that is at least about 95%, 96%, 97%, 98%, 99% or 100% identical to the amino acid sequence of SEQ ID NO:120,
[0454] (ii) a fusion polypeptide comprising an amino acid sequence that is at least about 95%, 96%, 97%, 98%, 99% or 100% identical to the amino acid sequence of SEQ ID NO:109, and
[0455] (iii) a heavy chain comprising an amino acid sequence that is at least about 95%, 96%, 97%, 98%, 99% or 100% identical to the amino acid sequence of SEQ ID NO:122.

[0456] More particularly, the TNF family ligand trimer-containing antigen binding molecule comprises (i) a light chain comprising the amino acid sequence of SEQ ID NO:120, (ii) a fusion polypeptide comprising the amino acid sequence of SEQ ID NO:109, and (iii) a heavy chain comprising the amino acid sequence of SEQ ID NO:122.

[0457] In another particular aspect, provided is a TNF family ligand trimer-containing antigen binding molecule, wherein the antigen binding molecule comprises
[0458] (i) a light chain comprising an amino acid sequence that is at least about 95%, 96%, 97%, 98%, 99% or 100% identical to the amino acid sequence of SEQ ID NO:126,
[0459] (ii) a fusion polypeptide comprising an amino acid sequence that is at least about 95%, 96%, 97%, 98%, 99% or 100% identical to the amino acid sequence of SEQ ID NO:109, and
[0460] (iii) a heavy chain comprising an amino acid sequence that is at least about 95%, 96%, 97%, 98%, 99% or 100% identical to the amino acid sequence of SEQ ID NO:128.

[0461] More particularly, the TNF family ligand trimer-containing antigen binding molecule comprises (i) a light chain comprising the amino acid sequence of SEQ ID NO:126, (ii) a fusion polypeptide comprising the amino acid sequence of SEQ ID NO:109, and (iii) a heavy chain comprising the amino acid sequence of SEQ ID NO:128.

[0462] In a particular aspect, provided is a TNF family ligand trimer-containing antigen binding molecule, wherein the antigen binding molecule comprises
[0463] (i) a light chain comprising an amino acid sequence that is at least about 95%, 96%, 97%, 98%, 99% or 100% identical to the amino acid sequence of SEQ ID NO:120,
[0464] (ii) a fusion polypeptide comprising an amino acid sequence that is at least about 95%, 96%, 97%, 98%, 99% or 100% identical to the amino acid sequence of SEQ ID NO:174, and
[0465] (iii) a heavy chain comprising an amino acid sequence that is at least about 95%, 96%, 97%, 98%, 99% or 100% identical to the amino acid sequence of SEQ ID NO:184.

[0466] More particularly, the TNF family ligand trimer-containing antigen binding molecule comprises (i) a light chain comprising the amino acid sequence of SEQ ID NO:120, (ii) a fusion polypeptide comprising the amino acid sequence of SEQ ID NO:174, and (iii) a heavy chain comprising the amino acid sequence of SEQ ID NO:184.

[0467] In another particular aspect, provided is a TNF family ligand trimer-containing antigen binding molecule, wherein the antigen binding molecule comprises
[0468] (i) a light chain comprising an amino acid sequence that is at least about 95%, 96%, 97%, 98%, 99% or 100% identical to the amino acid sequence of SEQ ID NO:126,
[0469] (ii) a fusion polypeptide comprising an amino acid sequence that is at least about 95%, 96%, 97%, 98%, 99% or 100% identical to the amino acid sequence of SEQ ID NO:174, and
[0470] (iii) a heavy chain comprising an amino acid sequence that is at least about 95%, 96%, 97%, 98%, 99% or 100% identical to the amino acid sequence of SEQ ID NO:188.

[0471] More particularly, the TNF family ligand trimer-containing antigen binding molecule comprises (i) a light chain comprising the amino acid sequence of SEQ ID NO:126, (ii) a fusion polypeptide comprising the amino acid sequence of SEQ ID NO:174, and (iii) a heavy chain comprising the amino acid sequence of SEQ ID NO:188.

[0472] TNF Family Ligand Trimer-Containing Antigen Binding Molecules, wherein the Target Cell Antigen is CEA

[0473] In one aspect, provided is a TNF family ligand trimer-containing antigen binding molecule, wherein the target cell antigen is CEA.

[0474] In a particular aspect, provided is a TNF family ligand trimer-containing antigen binding molecule as defined herein before, wherein the Fab domain capable of specific binding to CEA comprises a heavy chain variable region comprising an amino acid sequence that is at least about 95%, 96%, 97%, 98%, 99% or 100% identical to the amino acid sequence of SEQ ID NO:51 and a light chain variable region comprising an amino acid sequence that is at least about 95%, 96%, 97%, 98%, 99% or 100% identical to the amino acid sequence of SEQ ID NO:52.

[0475] In one aspect, the Fab domain capable of specific binding to CEA comprises a variable heavy chain comprising an amino acid sequence of SEQ ID NO:51 and a variable light chain comprising an amino acid sequence of SEQ ID NO:52 or a variable heavy chain comprising an amino acid sequence of SEQ ID NO:163 and a variable light chain comprising an amino acid sequence of SEQ ID NO:164. In a particular aspect, the Fab domain capable of specific binding to CEA comprises a heavy chain variable region comprising the amino acid sequence of SEQ ID NO:51 and a light chain variable region comprising the amino acid sequence of SEQ ID NO:52. In a specific aspect, the Fab domain capable of specific binding to CEA comprises a VH domain consisting of amino acid sequence of SEQ ID NO:51 and a VL domain consisting of the amino acid sequence of SEQ ID NO:52.

[0476] In a further aspect, the invention provides a TNF family ligand trimer-containing antigen binding molecule comprising
[0477] (a) a Fab domain capable of specific binding to CEA comprising a VH domain comprising an amino acid sequence of SEQ ID NO:51 and a VL domain comprising an amino acid sequence of SEQ ID NO:52,
[0478] (b) a Fc domain composed of a first and a second subunit capable of stable association, and
[0479] (c) a first polypeptide comprising two ectodomains of a TNF ligand family member or fragments thereof that are connected to each other by a peptide linker and a second polypeptide comprising one ectodomain of said TNF ligand family member or a fragment thereof, wherein the first polypeptide is fused at its N-terminus to the C-terminus to one of the subunits of the Fc domain and wherein the second polypeptide is fused at its N-terminus to the C-terminus of the other subunit of the Fc domain.

[0480] In another aspect, the invention provides a TNF family ligand trimer-containing antigen binding molecule comprising
[0481] (a) a Fab domain capable of specific binding to CEA comprising a VH domain comprising an amino acid sequence of SEQ ID NO:51 and a VL domain comprising an amino acid sequence of SEQ ID NO:52,
[0482] (b) a Fc domain composed of a first and a second subunit capable of stable association, and
[0483] (c) a first polypeptide comprising two ectodomains of a TNF ligand family member or fragments thereof that are connected to each other by a peptide linker and a second polypeptide comprising one ectodomain of said TNF ligand family member or a fragment thereof, wherein the first polypeptide is fused at its N-terminus to the C-terminus to one of the subunits of the Fc domain and wherein the second polypeptide is fused at its N-terminus to the C-terminus of the other subunit of the Fc domain and wherein the first polypeptide comprising two ectodomains of a TNF ligand family member or fragments thereof comprises an amino acid sequence selected from the group consisting of SEQ ID NO:9 and SEQ ID NO:10 and the second polypeptide comprising one ectodomain of said TNF ligand family member or a fragment thereof comprises the amino acid sequence selected from the group consisting of SEQ ID NO:1 and SEQ ID NO:5.

[0484] In a particular aspect, provided is a TNF family ligand trimer-containing antigen binding molecule comprising
[0485] (a) a Fab domain capable of specific binding to CEA comprising a VH domain comprising an amino acid sequence of SEQ ID NO:51 and a VL domain comprising an amino acid sequence of SEQ ID NO:52,
[0486] (b) a Fc domain composed of a first and a second subunit capable of stable association, and
[0487] (c) a first polypeptide comprising two ectodomains of a TNF ligand family member or fragments thereof that are connected to each other by a peptide linker and a second polypeptide comprising one ectodomain of said TNF ligand family member or a fragment thereof, wherein the first polypeptide is fused at its N-terminus to the C-terminus to one of the subunits of the Fc domain and wherein the second polypeptide is fused at its N-terminus to the C-terminus of the other subunit of the Fc domain and wherein the first polypeptide comprising two ectodomains of a TNF ligand family member comprising an amino acid sequence of SEQ ID NO:10 and the second polypeptide comprising one ectodomain of said TNF ligand family member comprising the amino acid sequence of SEQ ID NO:5.

[0488] In another aspect, provided is a TNF family ligand trimer-containing antigen binding molecule, wherein the antigen binding molecule comprises
[0489] (i) a light chain comprising the variable light chain of the Fab domain capable of specific binding to CEA,
[0490] (ii) a fusion polypeptide comprising a first subunit of a Fc domain and a first polypeptide comprising two ectodomains of a TNF ligand family member or fragments thereof that are connected to each other by a peptide linker, wherein the first polypeptide is fused at its N-terminus to the C-terminus of the first subunit of the Fc domain, and
[0491] (iii) a heavy chain comprising the variable heavy chain of the Fab domain capable of specific binding to CEA, a second subunit of the Fc domain and a second polypeptide comprising one ectodomain of said TNF ligand family member or a fragment thereof, wherein the variable heavy chain of the Fab domain capable of specific binding to CEA is fused at its C-terminus to the N-terminus of the second subunit of the Fc domain and wherein the second polypeptide comprising one ectodomain of said TNF ligand family member or a fragment thereof is fused at its N-terminus to the C-terminus of the second subunit of the Fc domain.

[0492] In a particular aspect, provided is a TNF family ligand trimer-containing antigen binding molecule, wherein the antigen binding molecule comprises
[0493] (i) a light chain comprising an amino acid sequence that is at least about 95%, 96%, 97%, 98%, 99% or 100% identical to the amino acid sequence of SEQ ID NO:156,
[0494] (ii) a fusion polypeptide comprising an amino acid sequence that is at least about 95%, 96%, 97%, 98%, 99% or 100% identical to the amino acid sequence of SEQ ID NO:104, and
[0495] (iii) a heavy chain comprising an amino acid sequence that is at least about 95%, 96%, 97%, 98%, 99% or 100% identical to the amino acid sequence of SEQ ID NO:155.

[0496] More particularly, the TNF family ligand trimer-containing antigen binding molecule comprises (i) a light chain comprising the amino acid sequence of SEQ ID NO:156, (ii) a fusion polypeptide comprising the amino acid sequence of SEQ ID NO:104, and (iii) a heavy chain comprising the amino acid sequence of SEQ ID NO:155.

[0497] In a further aspect, provided is a TNF family ligand trimer-containing antigen binding molecule, wherein the antigen binding molecule comprises
[0498] (i) a light chain comprising an amino acid sequence that is at least about 95%, 96%, 97%, 98%, 99% or 100% identical to the amino acid sequence of SEQ ID NO:156,
[0499] (ii) a fusion polypeptide comprising an amino acid sequence that is at least about 95%, 96%, 97%, 98%, 99% or 100% identical to the amino acid sequence of SEQ ID NO:178, and
[0500] (iii) a heavy chain comprising an amino acid sequence that is at least about 95%, 96%, 97%, 98%, 99% or 100% identical to the amino acid sequence of SEQ ID NO:194.

[0501] More particularly, the TNF family ligand trimer-containing antigen binding molecule comprises (i) a light chain comprising the amino acid sequence of SEQ ID NO:156, (ii) a fusion polypeptide comprising the amino acid sequence of SEQ ID NO:178, and (iii) a heavy chain comprising the amino acid sequence of SEQ ID NO:194.

[0502] In another aspect, provided is a TNF family ligand trimer-containing antigen binding molecule, wherein the antigen binding molecule comprises
[0503] (i) a light chain comprising the variable light chain of the Fab domain capable of specific binding to CEA,
[0504] (ii) a fusion polypeptide comprising a first subunit of a Fc domain and a second polypeptide comprising one ectodomain of said TNF ligand family member or a fragment thereof, wherein the second polypeptide is fused at its N-terminus to the C-terminus of the first subunit of the Fc domain, and
[0505] (iii) a heavy chain comprising the variable heavy chain of the Fab domain capable of specific binding to CEA, a second subunit of the Fc domain and and a first polypeptide comprising two ectodomains of a TNF ligand family member or fragments thereof that are connected to each other by a peptide linker, wherein the variable heavy chain of the Fab domain capable of specific binding to CEA is fused at its C-terminus to the N-terminus of the second subunit of the Fc domain and wherein the first polypeptide comprising two ectodomains of a TNF ligand family member or fragments thereof is fused at its N-terminus to the C-terminus of the second subunit of the Fc domain.

[0506] In a particular aspect, provided is a TNF family ligand trimer-containing antigen binding molecule, wherein the antigen binding molecule comprises
[0507] (i) a light chain comprising an amino acid sequence that is at least about 95%, 96%, 97%, 98%, 99% or 100% identical to the amino acid sequence of SEQ ID NO:156,
[0508] (ii) a fusion polypeptide comprising an amino acid sequence that is at least about 95%, 96%, 97%, 98%, 99% or 100% identical to the amino acid sequence of SEQ ID NO:109, and
[0509] (iii) a heavy chain comprising an amino acid sequence that is at least about 95%, 96%, 97%, 98%, 99% or 100% identical to the amino acid sequence of SEQ ID NO:158.

[0510] More particularly, the TNF family ligand trimer-containing antigen binding molecule comprises (i) a light chain comprising the amino acid sequence of SEQ ID NO:156, (ii) a fusion polypeptide comprising the amino acid sequence of SEQ ID NO:109, and (iii) a heavy chain comprising the amino acid sequence of SEQ ID NO:158.

[0511] In a particular aspect, provided is a TNF family ligand trimer-containing antigen binding molecule, wherein the antigen binding molecule comprises
[0512] (i) a light chain comprising an amino acid sequence that is at least about 95%, 96%, 97%, 98%, 99% or 100% identical to the amino acid sequence of SEQ ID NO:156,
[0513] (ii) a fusion polypeptide comprising an amino acid sequence that is at least about 95%, 96%, 97%, 98%, 99% or 100% identical to the amino acid sequence of SEQ ID NO:174, and
[0514] (iii) a heavy chain comprising an amino acid sequence that is at least about 95%, 96%, 97%, 98%, 99% or 100% identical to the amino acid sequence of SEQ ID NO:192.

[0515] More particularly, the TNF family ligand trimer-containing antigen binding molecule comprises (i) a light chain comprising the amino acid sequence of SEQ ID NO:156, (ii) a fusion polypeptide comprising the amino acid sequence of SEQ ID NO:174, and (iii) a heavy chain comprising the amino acid sequence of SEQ ID NO:192.

[0516] Polynucleotides

[0517] The invention further provides isolated polynucleotides encoding a TNF family ligand trimer-containing antigen binding molecule as described herein or a fragment thereof.

[0518] The isolated polynucleotides encoding TNF ligand trimer-containing antigen binding molecules of the invention may be expressed as a single polynucleotide that encodes the entire antigen binding molecule or as multiple (e.g., two or more) polynucleotides that are co-expressed. Polypeptides encoded by polynucleotides that are co-expressed may associate through, e.g., disulfide bonds or other means to form a functional antigen binding molecule. For example, the light chain portion of an immunoglobulin may be encoded by a separate polynucleotide from the heavy chain portion of the immunoglobulin. When co-expressed, the heavy chain polypeptides will associate with the light chain polypeptides to form the immunoglobulin.

[0519] In some aspects, the isolated polynucleotide encodes the entire TNF family ligand trimer-containing antigen binding molecule according to the invention as described herein. In particular, the isolated polynucleotide encodes a polypeptide comprised in the TNF family ligand trimer-containing antigen binding molecule according to the invention as described herein.

[0520] In one aspect, the present invention is directed to an isolated polynucleotide encoding a TNF family ligand trimer-containing antigen binding molecule, wherein the polynucleotide comprises (a) a sequence that encodes a Fab domain capable of specific binding to a target cell antigen, (b) a sequence that encodes a first subunit of a Fc domain and first polypeptide comprising two ectodomains of a TNF ligand family member or fragments thereof that are connected to each other by a peptide linker and (c) a sequence that encodes a second subunit of a Fc domain and a second polypeptide comprising one ectodomain of said TNF ligand family member or a fragment thereof.

[0521] In certain aspects, provided an isolated polynucleotide encoding a TNF family ligand trimer-containing antigen binding molecule, wherein the polynucleotide comprises (a) a sequence that encodes a Fab domain capable of specific binding to a target cell antigen, (b) a sequence that encodes a first subunit of a Fc domain and first polypeptide comprising two ectodomains of a TNF ligand family member or fragments thereof that are connected to each other by a peptide linker, (c) a sequence that encodes a second subunit of a Fc domain and a second polypeptide comprising one ectodomain of said TNF ligand family member or a fragment thereof, and (d) a sequence that encodes a Fab domain that is not capable of specific binding to a target cell antigen.

[0522] In another aspect, provided is an isolated polynucleotide encoding a 4-1BB ligand trimer-containing antigen binding molecule, wherein the polynucleotide comprises (a) a sequence that encodes a Fab domain capable of specific binding to a target cell antigen, (b) a sequence that encodes a first subunit of a Fc domain and first polypeptide comprising two ectodomains of a TNF ligand family member or fragments thereof that are connected to each other by a peptide linker and (c) a sequence that encodes a second subunit of a Fc domain and a second polypeptide comprising one ectodomain of said TNF ligand family member or a fragment thereof.

[0523] In a further aspect, the invention is directed to an isolated polynucleotide comprising a sequence that encodes a polypeptide comprising two 4-1BBL fragments comprising an amino acid sequence that is at least about 90%, 95%, 98% or 100% identical to an amino acid sequence shown in SEQ ID NO:1, SEQ ID NO:2, SEQ ID NO:3, SEQ ID NO:4, SEQ ID NO:5, SEQ ID NO:6, SEQ ID NO:7 and SEQ ID NO:8, and to a polynucleotide comprising a sequence that encodes a polypeptide comprising one 4-1BBL fragment comprising an amino acid sequence that is at least about 90%, 95%, 98% or 100% identical to an amino acid sequence shown in SEQ ID NO:1, SEQ ID NO:2, SEQ ID NO:3, SEQ ID NO:4, SEQ ID NO:5, SEQ ID NO:6, SEQ ID NO:7 and SEQ ID NO:8.

[0524] Furthermore, provided is an isolated polynucleotide encoding a OX40 ligand trimer-containing antigen binding molecule, wherein the polynucleotide comprises (a) a sequence that encodes a moiety capable of specific binding to a target cell antigen, (b) a sequence that encodes a polypeptide comprising two ectodomains of OX40L or two fragments thereof that are connected to each other by a peptide linker and (c) a sequence that encodes a polypeptide comprising one ectodomain of OX40L or a fragment thereof.

[0525] In another aspect, the invention is directed to an isolated polynucleotide comprising a sequence that encodes a polypeptide comprising two 4-1BBL fragments comprising an amino acid sequence that is at least about 90%, 95%, 98% or 100% identical to an amino acid sequence shown in SEQ ID NO:9 or SEQ ID NO:10, and to a polynucleotide comprising a sequence that encodes a polypeptide comprising one 4-1BBL fragment comprising an amino acid sequence that is is at least about 90%, 95%, 98% or 100% identical to an amino acid sequence shown in SEQ ID NO:1 or SEQ ID NO:5.

[0526] In further aspects, the invention relates to the polynucleotides comprising a sequence that is at least about 90%, 95%, 98% or 100% identical to the specific cDNA sequences disclosed herein. In a particular aspect, the invention relates to a polynucleotide comprising a sequence that is identical to one of the specific cDNA sequences disclosed herein.

[0527] In certain aspects, the polynucleotide or nucleic acid is DNA. In other embodiments, a polynucleotide of the present invention is RNA, for example, in the form of messenger RNA (mRNA). RNA of the present invention may be single stranded or double stranded.

[0528] Recombinant Methods

[0529] TNF family ligand trimer-containing antigen binding molecules of the invention may be obtained, for example, by solid-state peptide synthesis (e.g. Merrifield solid phase synthesis) or recombinant production. For recombinant production one or more polynucleotide encoding the TNF family ligand trimer-containing antigen binding molecule or polypeptide fragments thereof, e.g., as described above, is isolated and inserted into one or more vectors for further cloning and/or expression in a host cell. Such polynucleotide may be readily isolated and sequenced using conventional procedures. In one aspect of the invention, a vector, preferably an expression vector, comprising one or more of the polynucleotides of the invention is provided. Methods which are well known to those skilled in the art can be used to construct expression vectors containing the coding sequence of the TNF family ligand trimer-containing antigen binding molecule (fragment) along with appropriate transcriptional/translational control signals. These methods include in vitro recombinant DNA techniques, synthetic techniques and in vivo recombination/genetic recombination. See, for example, the techniques described in Maniatis et al., MOLECULAR CLONING: A LABORATORY MANUAL, Cold Spring Harbor Laboratory, N.Y. (1989); and Ausubel et al., CURRENT PROTOCOLS IN MOLECULAR BIOLOGY, Greene Publishing Associates and Wiley Interscience, N.Y. (1989). The expression vector can be part of a plasmid, virus, or may be a nucleic acid fragment. The expression vector includes an expression cassette into which the polynucleotide encoding the TNF family ligand trimer-containing antigen binding molecule or polypeptide fragments thereof (i.e. the coding region) is cloned in operable association with a promoter and/or other transcription or translation control elements. As used herein, a “coding region” is a portion of nucleic acid which consists of codons translated into amino acids. Although a “stop codon” (TAG, TGA, or TAA) is not translated into an amino acid, it may be considered to be part of a coding region, if present, but any flanking sequences, for example promoters, ribosome binding sites, transcriptional terminators, introns, 5′ and 3′ untranslated regions, and the like, are not part of a coding region. Two or more coding regions can be present in a single polynucleotide construct, e.g. on a single vector, or in separate polynucleotide constructs, e.g. on separate (different) vectors. Furthermore, any vector may contain a single coding region, or may comprise two or more coding regions, e.g. a vector of the present invention may encode one or more polypeptides, which are post- or co-translationally separated into the final proteins via proteolytic cleavage. In addition, a vector, polynucleotide, or nucleic acid of the invention may encode heterologous coding regions, either fused or unfused to a polynucleotide encoding the TNF family ligand trimer-containing antigen binding molecule of the invention or polypeptide fragments thereof, or variants or derivatives thereof. Heterologous coding regions include without limitation specialized elements or motifs, such as a secretory signal peptide or a heterologous functional domain. An operable association is when a coding region for a gene product, e.g. a polypeptide, is associated with one or more regulatory sequences in such a way as to place expression of the gene product under the influence or control of the regulatory sequence(s). Two DNA fragments (such as a polypeptide coding region and a promoter associated therewith) are “operably associated” if induction of promoter function results in the transcription of mRNA encoding the desired gene product and if the nature of the linkage between the two DNA fragments does not interfere with the ability of the expression regulatory sequences to direct the expression of the gene product or interfere with the ability of the DNA template to be transcribed. Thus, a promoter region would be operably associated with a nucleic acid encoding a polypeptide if the promoter was capable of effecting transcription of that nucleic acid. The promoter may be a cell-specific promoter that directs substantial transcription of the DNA only in predetermined cells. Other transcription control elements, besides a promoter, for example enhancers, operators, repressors, and transcription termination signals, can be operably associated with the polynucleotide to direct cell-specific transcription.

[0530] Suitable promoters and other transcription control regions are disclosed herein. A variety of transcription control regions are known to those skilled in the art. These include, without limitation, transcription control regions, which function in vertebrate cells, such as, but not limited to, promoter and enhancer segments from cytomegaloviruses (e.g. the immediate early promoter, in conjunction with intron-A), simian virus 40 (e.g. the early promoter), and retroviruses (such as, e.g. Rous sarcoma virus). Other transcription control regions include those derived from vertebrate genes such as actin, heat shock protein, bovine growth hormone and rabbit a-globin, as well as other sequences capable of controlling gene expression in eukaryotic cells. Additional suitable transcription control regions include tissue-specific promoters and enhancers as well as inducible promoters (e.g. promoters inducible tetracyclins). Similarly, a variety of translation control elements are known to those of ordinary skill in the art. These include, but are not limited to ribosome binding sites, translation initiation and termination codons, and elements derived from viral systems (particularly an internal ribosome entry site, or IRES, also referred to as a CITE sequence). The expression cassette may also include other features such as an origin of replication, and/or chromosome integration elements such as retroviral long terminal repeats (LTRs), or adeno-associated viral (AAV) inverted terminal repeats (ITRs).

[0531] Polynucleotide and nucleic acid coding regions of the present invention may be associated with additional coding regions which encode secretory or signal peptides, which direct the secretion of a polypeptide encoded by a polynucleotide of the present invention. For example, if secretion of the TNF family ligand trimer-containing antigen binding molecule or polypeptide fragments thereof is desired, DNA encoding a signal sequence may be placed upstream of the nucleic acid encoding a TNF family ligand trimer-containing antigen binding molecule of the invention or polypeptide fragments thereof. According to the signal hypothesis, proteins secreted by mammalian cells have a signal peptide or secretory leader sequence which is cleaved from the mature protein once export of the growing protein chain across the rough endoplasmic reticulum has been initiated. Those of ordinary skill in the art are aware that polypeptides secreted by vertebrate cells generally have a signal peptide fused to the N-terminus of the polypeptide, which is cleaved from the translated polypeptide to produce a secreted or “mature” form of the polypeptide. In certain embodiments, the native signal peptide, e.g. an immunoglobulin heavy chain or light chain signal peptide is used, or a functional derivative of that sequence that retains the ability to direct the secretion of the polypeptide that is operably associated with it. Alternatively, a heterologous mammalian signal peptide, or a functional derivative thereof, may be used. For example, the wild-type leader sequence may be substituted with the leader sequence of human tissue plasminogen activator (TPA) or mouse β-glucuronidase.

[0532] DNA encoding a short protein sequence that could be used to facilitate later purification (e.g. a histidine tag) or assist in labeling the fusion protein may be included within or at the ends of the polynucleotide encoding a TNF family ligand trimer-containing antigen binding molecule of the invention or polypeptide fragments thereof.

[0533] In a further aspect of the invention, a host cell comprising one or more polynucleotides of the invention is provided. In certain embodiments a host cell comprising one or more vectors of the invention is provided. The polynucleotides and vectors may incorporate any of the features, singly or in combination, described herein in relation to polynucleotides and vectors, respectively. In one aspect, a host cell comprises (e.g. has been transformed or transfected with) a vector comprising a polynucleotide that encodes (part of) a TNF family ligand trimer-containing antigen binding molecule of the invention of the invention. As used herein, the term “host cell” refers to any kind of cellular system which can be engineered to generate the fusion proteins of the invention or fragments thereof. Host cells suitable for replicating and for supporting expression of antigen binding molecules are well known in the art. Such cells may be transfected or transduced as appropriate with the particular expression vector and large quantities of vector containing cells can be grown for seeding large scale fermenters to obtain sufficient quantities of the antigen binding molecule for clinical applications. Suitable host cells include prokaryotic microorganisms, such as E. coli, or various eukaryotic cells, such as Chinese hamster ovary cells (CHO), insect cells, or the like. For example, polypeptides may be produced in bacteria in particular when glycosylation is not needed. After expression, the polypeptide may be isolated from the bacterial cell paste in a soluble fraction and can be further purified. In addition to prokaryotes, eukaryotic microbes such as filamentous fungi or yeast are suitable cloning or expression hosts for polypeptide-encoding vectors, including fungi and yeast strains whose glycosylation pathways have been “humanized”, resulting in the production of a polypeptide with a partially or fully human glycosylation pattern. See Gerngross, Nat Biotech 22, 1409-1414 (2004), and Li et al., Nat Biotech 24, 210-215 (2006).

[0534] Suitable host cells for the expression of (glycosylated) polypeptides are also derived from multicellular organisms (invertebrates and vertebrates). Examples of invertebrate cells include plant and insect cells. Numerous baculoviral strains have been identified which may be used in conjunction with insect cells, particularly for transfection of Spodoptera frugiperda cells. Plant cell cultures can also be utilized as hosts. See e.g. U.S. Pat. Nos. 5,959,177, 6,040,498, 6,420,548, 7,125,978, and 6,417,429 (describing PLANTIBODIES™ technology for producing antibodies in transgenic plants). Vertebrate cells may also be used as hosts. For example, mammalian cell lines that are adapted to grow in suspension may be useful. Other examples of useful mammalian host cell lines are monkey kidney CV1 line transformed by SV40 (COS-7); human embryonic kidney line (293 or 293T cells as described, e.g., in Graham et al., J Gen Virol 36, 59 (1977)), baby hamster kidney cells (BHK), mouse sertoli cells (TM4 cells as described, e.g., in Mather, Biol Reprod 23, 243-251 (1980)), monkey kidney cells (CV1), African green monkey kidney cells (VERO-76), human cervical carcinoma cells (HELA), canine kidney cells (MDCK), buffalo rat liver cells (BRL 3A), human lung cells (W138), human liver cells (Hep G2), mouse mammary tumor cells (MMT 060562), TRI cells (as described, e.g., in Mather et al., Annals N.Y. Acad Sci 383, 44-68 (1982)), MRC 5 cells, and FS4 cells. Other useful mammalian host cell lines include Chinese hamster ovary (CHO) cells, including dhfr-CHO cells (Urlaub et al., Proc Natl Acad Sci USA 77, 4216 (1980)); and myeloma cell lines such as YO, NSO, P3X63 and Sp2/0. For a review of certain mammalian host cell lines suitable for protein production, see, e.g., Yazaki and Wu, Methods in Molecular Biology, Vol. 248 (B.K.C. Lo, ed., Humana Press, Totowa, N.J.), pp. 255-268 (2003). Host cells include cultured cells, e.g., mammalian cultured cells, yeast cells, insect cells, bacterial cells and plant cells, to name only a few, but also cells comprised within a transgenic animal, transgenic plant or cultured plant or animal tissue. In one embodiment, the host cell is a eukaryotic cell, preferably a mammalian cell, such as a Chinese Hamster Ovary (CHO) cell, a human embryonic kidney (HEK) cell or a lymphoid cell (e.g., Y0, NS0, Sp20 cell). Standard technologies are known in the art to express foreign genes in these systems. Cells expressing a polypeptide comprising either the heavy or the light chain of an immunoglobulin, may be engineered so as to also express the other of the immunoglobulin chains such that the expressed product is an immunoglobulin that has both a heavy and a light chain.

[0535] In one aspect, a method of producing a TNF family ligand trimer-containing antigen binding molecule of the invention or polypeptide fragments thereof is provided, wherein the method comprises culturing a host cell comprising polynucleotides encoding the TNF family ligand trimer-containing antigen binding molecule of the invention or polypeptide fragments thereof, as provided herein, under conditions suitable for expression of the TNF family ligand trimer-containing antigen binding molecule of the invention or polypeptide fragments thereof, and recovering the TNF family ligand trimer-containing antigen binding molecule of the invention or polypeptide fragments thereof from the host cell (or host cell culture medium).

[0536] In the TNF family ligand trimer-containing antigen binding molecule of the invention, the components (a Fab domain capable of specific binding to a target cell antigen, one polypeptide comprising two ectodomains of a TNF ligand family member or fragments thereof and a polypeptide comprising one ectodomain of said TNF family ligand family member or a fragment thereof) are not genetically fused to each other. The polypeptides are designed such that its components (two ectodomains of a TNF ligand family member or fragments thereof and other components such as CH or CL) are fused to each other directly or through a linker sequence. The composition and length of the linker may be determined in accordance with methods well known in the art and may be tested for efficacy. Examples of linker sequences between different components of the antigen binding molecules of the invention are found in the sequences provided herein. Additional sequences may also be included to incorporate a cleavage site to separate the individual components of the fusion protein if desired, for example an endopeptidase recognition sequence.

[0537] In certain embodiments the moieties capable of specific binding to a target cell antigen (e.g. Fab fragments) forming part of the antigen binding molecule comprise at least an immunoglobulin variable region capable of binding to an antigen. Variable regions can form part of and be derived from naturally or non-naturally occurring antibodies and fragments thereof. Methods to produce polyclonal antibodies and monoclonal antibodies are well known in the art (see e.g. Harlow and Lane, “Antibodies, a laboratory manual”, Cold Spring Harbor Laboratory, 1988). Non-naturally occurring antibodies can be constructed using solid phase-peptide synthesis, can be produced recombinantly (e.g. as described in U.S. Pat. No. 4,186,567) or can be obtained, for example, by screening combinatorial libraries comprising variable heavy chains and variable light chains (see e.g. U.S. Pat. No. 5,969,108 to McCafferty).

[0538] Any animal species of immunoglobulin can be used in the invention. Non-limiting immunoglobulins useful in the present invention can be of murine, primate, or human origin. If the fusion protein is intended for human use, a chimeric form of immunoglobulin may be used wherein the constant regions of the immunoglobulin are from a human. A humanized or fully human form of the immunoglobulin can also be prepared in accordance with methods well known in the art (see e.g. U.S. Pat. No. 5,565,332 to Winter). Humanization may be achieved by various methods including, but not limited to (a) grafting the non-human (e.g., donor antibody) CDRs onto human (e.g. recipient antibody) framework and constant regions with or without retention of critical framework residues (e.g. those that are important for retaining good antigen binding affinity or antibody functions), (b) grafting only the non-human specificity-determining regions (SDRs or a-CDRs; the residues critical for the antibody-antigen interaction) onto human framework and constant regions, or (c) transplanting the entire non-human variable domains, but “cloaking” them with a human-like section by replacement of surface residues. Humanized antibodies and methods of making them are reviewed, e.g., in Almagro and Fransson, Front Biosci 13, 1619-1633 (2008), and are further described, e.g., in Riechmann et al., Nature 332, 323-329 (1988); Queen et al., Proc Natl Acad Sci USA 86, 10029-10033 (1989); U.S. Pat. Nos. 5,821,337, 7,527,791, 6,982,321, and 7,087,409; Jones et al., Nature 321, 522-525 (1986); Morrison et al., Proc Natl Acad Sci 81, 6851-6855 (1984); Morrison and 0i, Adv Immunol 44, 65-92 (1988); Verhoeyen et al., Science 239, 1534-1536 (1988); Padlan, Molec Immun 31(3), 169-217 (1994); Kashmiri et al., Methods 36, 25-34 (2005) (describing SDR (a-CDR) grafting); Padlan, Mol Immunol 28, 489-498 (1991) (describing “resurfacing”); Dall'Acqua et al., Methods 36, 43-60 (2005) (describing “FR shuffling”); and Osbourn et al., Methods 36, 61-68 (2005) and Klimka et al., Br J Cancer 83, 252-260 (2000) (describing the “guided selection” approach to FR shuffling). Particular immunoglobulins according to the invention are human immunoglobulins. Human antibodies and human variable regions can be produced using various techniques known in the art. Human antibodies are described generally in van Dijk and van de Winkel, Curr Opin Pharmacol 5, 368-74 (2001) and Lonberg, Curr Opin Immunol 20, 450-459 (2008). Human variable regions can form part of and be derived from human monoclonal antibodies made by the hybridoma method (see e.g. Monoclonal Antibody Production Techniques and Applications, pp. 51-63 (Marcel Dekker, Inc., New York, 1987)). Human antibodies and human variable regions may also be prepared by administering an immunogen to a transgenic animal that has been modified to produce intact human antibodies or intact antibodies with human variable regions in response to antigenic challenge (see e.g. Lonberg, Nat Biotech 23, 1117-1125 (2005). Human antibodies and human variable regions may also be generated by isolating Fv clone variable region sequences selected from human-derived phage display libraries (see e.g., Hoogenboom et al. in Methods in Molecular Biology 178, 1-37 (O'Brien et al., ed., Human Press, Totowa, N.J., 2001); and McCafferty et al., Nature 348, 552-554; Clackson et al., Nature 352, 624-628 (1991)). Phage typically display antibody fragments, either as single-chain Fv (scFv) fragments or as Fab fragments.

[0539] In certain aspects, the Fab domains capable of specific binding to a target cell antigen (e.g. Fab fragments) comprised in the antigen binding molecules of the present invention are engineered to have enhanced binding affinity according to, for example, the methods disclosed in PCT publication WO 2012/020006 (see Examples relating to affinity maturation) or U.S. Pat. Appl. Publ. No. 2004/0132066. The ability of the antigen binding molecules of the invention to bind to a specific antigenic determinant can be measured either through an enzyme-linked immunosorbent assay (ELISA) or other techniques familiar to one of skill in the art, e.g. surface plasmon resonance technique (Liljeblad, et al., Glyco J 17, 323-329 (2000)), and traditional binding assays (Heeley, Endocr Res 28, 217-229 (2002)). Competition assays may be used to identify an antigen binding molecule that competes with a reference antibody for binding to a particular antigen. In certain embodiments, such a competing antigen binding molecule binds to the same epitope (e.g. a linear or a conformational epitope) that is bound by the reference antigen binding molecule. Detailed exemplary methods for mapping an epitope to which an antigen binding molecule binds are provided in Morris (1996) “Epitope Mapping Protocols”, in Methods in Molecular Biology vol. 66 (Humana Press, Totowa, N.J.). In an exemplary competition assay, immobilized antigen is incubated in a solution comprising a first labeled antigen binding molecule that binds to the antigen and a second unlabeled antigen binding molecule that is being tested for its ability to compete with the first antigen binding molecule for binding to the antigen. The second antigen binding molecule may be present in a hybridoma supernatant. As a control, immobilized antigen is incubated in a solution comprising the first labeled antigen binding molecule but not the second unlabeled antigen binding molecule. After incubation under conditions permissive for binding of the first antibody to the antigen, excess unbound antibody is removed, and the amount of label associated with immobilized antigen is measured. If the amount of label associated with immobilized antigen is substantially reduced in the test sample relative to the control sample, then that indicates that the second antigen binding molecule is competing with the first antigen binding molecule for binding to the antigen. See Harlow and Lane (1988) Antibodies: A Laboratory Manual ch.14 (Cold Spring Harbor Laboratory, Cold Spring Harbor, N.Y.).

[0540] TNF ligand trimer-containing antigen binding molecules of the invention prepared as described herein may be purified by art-known techniques such as high performance liquid chromatography, ion exchange chromatography, gel electrophoresis, affinity chromatography, size exclusion chromatography, and the like. The actual conditions used to purify a particular protein will depend, in part, on factors such as net charge, hydrophobicity, hydrophilicity etc., and will be apparent to those having skill in the art. For affinity chromatography purification an antibody, ligand, receptor or antigen can be used to which the TNF ligand trimer-containing antigen binding molecule binds. For example, for affinity chromatography purification of fusion proteins of the invention, a matrix with protein A or protein G may be used. Sequential Protein A or G affinity chromatography and size exclusion chromatography can be used to isolate an antigen binding molecule essentially as described in the Examples. The purity of the TNF ligand trimer-containing antigen binding molecule or fragments thereof can be determined by any of a variety of well-known analytical methods including gel electrophoresis, high pressure liquid chromatography, and the like. For example, the TNF ligand trimer-containing antigen binding molecules expressed as described in the Examples were shown to be intact and properly assembled as demonstrated by reducing and non-reducing SDS-PAGE.

[0541] Assays

[0542] The antigen binding molecules provided herein may be identified, screened for, or characterized for their physical/chemical properties and/or biological activities by various assays known in the art.

[0543] 1. Affinity Assays

[0544] The affinity of the TNF family ligand trimer-containing antigen binding molecule provided herein for the corresponding TNF receptor can be determined in accordance with the methods set forth in the Examples by surface plasmon resonance (SPR), using standard instrumentation such as a BIAcore instrument (GE Healthcare), and receptors or target proteins such as may be obtained by recombinant expression. The affinity of the TNF family ligand trimer-containing antigen binding molecule for the target cell antigen can also be determined by surface plasmon resonance (SPR), using standard instrumentation such as a BIAcore instrument (GE Healthcare), and receptors or target proteins such as may be obtained by recombinant expression. A specific illustrative and exemplary embodiment for measuring binding affinity is described in Example 3. According to one aspect, K_{D} is measured by surface plasmon resonance using a BIACORE® T100 machine (GE Healthcare) at 25° C.

[0545] 2. Binding Assays and other Assays

[0546] Binding of the TNF family ligand trimer-containing antigen binding molecule provided herein to the corresponding receptor expressing cells may be evaluated using cell lines expressing the particular receptor or target antigen, for example by flow cytometry (FACS). In one aspect, fresh peripheral blood mononuclear cells (PBMCs) expressing the TNF receptor are used in the binding assay (Example 6.1 and 7.1). These cells are used directly after isolation (naive PMBCs) or after stimulation (activated PMBCs). In another aspect, activated mouse splenocytes (expressing the TNF receptor molecule) were used to demonstrate the binding of the TNF family ligand trimer-containing antigen binding molecule of the invention to the corresponding TNF receptor expressing cells.

[0547] In a further aspect, cancer cell lines expressing the target cell antigen, for example FAP, were used to demonstrate the binding of the antigen binding molecules to the target cell antigen (Example 6.2). In another aspect, cancer cell lines expressing CD19 were used to demonstrate the binding of the antigen binding molecules to CD19 (Example 7.2).

[0548] In another aspect, competition assays may be used to identify an antigen binding molecule that competes with a specific antibody or antigen binding molecule for binding to the target or TNF receptor, respectively. In certain embodiments, such a competing antigen binding molecule binds to the same epitope (e.g., a linear or a conformational epitope) that is bound by a specific anti-target antibody or a specific anti-TNF receptor antibody. Detailed exemplary methods for mapping an epitope to which an antibody binds are provided in Morris (1996) “Epitope Mapping Protocols,” in Methods in Molecular Biology vol. 66 (Humana Press, Totowa, N.J.).

[0549] 3. Activity Assays

[0550] In one aspect, assays are provided for identifying TNF family ligand trimer-containing antigen binding molecules that bind to a specific target cell antigen and to a specific TNF receptor having biological activity. Biological activity may include, e.g., agonistic signalling through the TNF receptor on cells expressing the target cell antigen. TNF family ligand trimer-containing antigen binding molecules identified by the assays as having such biological activity in vitro are also provided.

[0551] In certain aspects, a TNF family ligand trimer-containing antigen binding molecule of the invention is tested for such biological activity. Assays for detecting the biological activity of the molecules of the invention are those described in Examples 6 and 7. Furthermore, assays for detecting cell lysis (e.g. by measurement of LDH release), induced apoptosis kinetics (e.g. by measurement of Caspase 3/7 activity) or apoptosis (e.g. using the TUNEL assay) are well known in the art. In addition the biological activity of such complexes can be assessed by evaluating their effects on survival, proliferation and lymphokine secretion of various lymphocyte subsets such as NK cells, NKT-cells or γδ T-cells or assessing their capacity to modulate phenotype and function of antigen presenting cells such as dendritic cells, monocytes/macrophages or B-cells.

[0552] Pharmaceutical Compositions, Formulations and Routes of Administation

[0553] In a further aspect, the invention provides pharmaceutical compositions comprising any of the TNF family ligand trimer-containing antigen binding molecules provided herein, e.g., for use in any of the below therapeutic methods. In one embodiment, a pharmaceutical composition comprises any of the TNF family ligand trimer-containing antigen binding molecules provided herein and at least one pharmaceutically acceptable excipient. In another embodiment, a pharmaceutical composition comprises any of the TNF family ligand trimer-containing antigen binding molecules provided herein and at least one additional therapeutic agent, e.g., as described below.

[0554] Pharmaceutical compositions of the present invention comprise a therapeutically effective amount of one or more TNF family ligand trimer-containing antigen binding molecules dissolved or dispersed in a pharmaceutically acceptable excipient. The phrases “pharmaceutical or pharmacologically acceptable” refers to molecular entities and compositions that are generally non-toxic to recipients at the dosages and concentrations employed, i.e. do not produce an adverse, allergic or other untoward reaction when administered to an animal, such as, for example, a human, as appropriate. The preparation of a pharmaceutical composition that contains at least one TNF family ligand trimer-containing antigen binding molecule and optionally an additional active ingredient will be known to those of skill in the art in light of the present disclosure, as exemplified by Remington's Pharmaceutical Sciences, 18th Ed. Mack Printing Company, 1990, incorporated herein by reference. In particular, the compositions are lyophilized formulations or aqueous solutions. As used herein, “pharmaceutically acceptable excipient” includes any and all solvents, buffers, dispersion media, coatings, surfactants, antioxidants, preservatives (e.g. antibacterial agents, antifungal agents), isotonic agents, salts, stabilizers and combinations thereof, as would be known to one of ordinary skill in the art.

[0555] Parenteral compositions include those designed for administration by injection, e.g. subcutaneous, intradermal, intralesional, intravenous, intraarterial intramuscular, intrathecal or intraperitoneal injection. For injection, the TNF family ligand trimer-containing antigen binding molecules of the invention may be formulated in aqueous solutions, preferably in physiologically compatible buffers such as Hanks' solution, Ringer's solution, or physiological saline buffer. The solution may contain formulatory agents such as suspending, stabilizing and/or dispersing agents. Alternatively, the fusion proteins may be in powder form for constitution with a suitable vehicle, e.g., sterile pyrogen-free water, before use. Sterile injectable solutions are prepared by incorporating the fusion proteins of the invention in the required amount in the appropriate solvent with various of the other ingredients enumerated below, as required. Sterility may be readily accomplished, e.g., by filtration through sterile filtration membranes. Generally, dispersions are prepared by incorporating the various sterilized active ingredients into a sterile vehicle which contains the basic dispersion medium and/or the other ingredients. In the case of sterile powders for the preparation of sterile injectable solutions, suspensions or emulsion, the preferred methods of preparation are vacuum-drying or freeze-drying techniques which yield a powder of the active ingredient plus any additional desired ingredient from a previously sterile-filtered liquid medium thereof. The liquid medium should be suitably buffered if necessary and the liquid diluent first rendered isotonic prior to injection with sufficient saline or glucose. The composition must be stable under the conditions of manufacture and storage, and preserved against the contaminating action of microorganisms, such as bacteria and fungi. It will be appreciated that endotoxin contamination should be kept minimally at a safe level, for example, less that 0.5 ng/mg protein. Suitable pharmaceutically acceptable excipients include, but are not limited to: buffers such as phosphate, citrate, and other organic acids; antioxidants including ascorbic acid and methionine; preservatives (such as octadecyldimethylbenzyl ammonium chloride; hexamethonium chloride; benzalkonium chloride; benzethonium chloride; phenol, butyl or benzyl alcohol; alkyl parabens such as methyl or propyl paraben; catechol; resorcinol; cyclohexanol; 3-pentanol; and m-cresol); low molecular weight (less than about 10 residues) polypeptides; proteins, such as serum albumin, gelatin, or immunoglobulins; hydrophilic polymers such as polyvinylpyrrolidone; amino acids such as glycine, glutamine, asparagine, histidine, arginine, or lysine; monosaccharides, disaccharides, and other carbohydrates including glucose, mannose, or dextrins; chelating agents such as EDTA; sugars such as sucrose, mannitol, trehalose or sorbitol; salt-forming counter-ions such as sodium; metal complexes (e.g. Zn-protein complexes); and/or non-ionic surfactants such as polyethylene glycol (PEG). Aqueous injection suspensions may contain compounds which increase the viscosity of the suspension, such as sodium carboxymethyl cellulose, sorbitol, dextran, or the like. Optionally, the suspension may also contain suitable stabilizers or agents which increase the solubility of the compounds to allow for the preparation of highly concentrated solutions. Additionally, suspensions of the active compounds may be prepared as appropriate oily injection suspensions. Suitable lipophilic solvents or vehicles include fatty oils such as sesame oil, or synthetic fatty acid esters, such as ethyl cleats or triglycerides, or liposomes.

[0556] Active ingredients may be entrapped in microcapsules prepared, for example, by coacervation techniques or by interfacial polymerization, for example, hydroxymethylcellulose or gelatin-microcapsules and poly-(methylmethacylate) microcapsules, respectively, in colloidal drug delivery systems (for example, liposomes, albumin microspheres, microemulsions, nano-particles and nanocapsules) or in macroemulsions. Such techniques are disclosed in Remington's Pharmaceutical Sciences (18th Ed. Mack Printing Company, 1990). Sustained-release preparations may be prepared. Suitable examples of sustained-release preparations include semipermeable matrices of solid hydrophobic polymers containing the polypeptide, which matrices are in the form of shaped articles, e.g. films, or microcapsules. In particular embodiments, prolonged absorption of an injectable composition can be brought about by the use in the compositions of agents delaying absorption, such as, for example, aluminum monostearate, gelatin or combinations thereof.

[0557] Exemplary pharmaceutically acceptable excipients herein further include insterstitial drug dispersion agents such as soluble neutral-active hyaluronidase glycoproteins (sHASEGP), for example, human soluble PH-20 hyaluronidase glycoproteins, such as rHuPH20 (HYLENEX®, Baxter International, Inc.). Certain exemplary sHASEGPs and methods of use, including rHuPH20, are described in US Patent Publication Nos. 2005/0260186 and 2006/0104968. In one aspect, a sHASEGP is combined with one or more additional glycosaminoglycanases such as chondroitinases.

[0558] Exemplary lyophilized antibody formulations are described in U.S. Pat. No. 6,267,958. Aqueous antibody formulations include those described in U.S. Pat. No. 6,171,586 and WO2006/044908, the latter formulations including a histidine-acetate buffer.

[0559] In addition to the compositions described previously, the fusion proteins may also be formulated as a depot preparation. Such long acting formulations may be administered by implantation (for example subcutaneously or intramuscularly) or by intramuscular injection. Thus, for example, the fusion proteins may be formulated with suitable polymeric or hydrophobic materials (for example as an emulsion in an acceptable oil) or ion exchange resins, or as sparingly soluble derivatives, for example, as a sparingly soluble salt.

[0560] Pharmaceutical compositions comprising the fusion proteins of the invention may be manufactured by means of conventional mixing, dissolving, emulsifying, encapsulating, entrapping or lyophilizing processes. Pharmaceutical compositions may be formulated in conventional manner using one or more physiologically acceptable carriers, diluents, excipients or auxiliaries which facilitate processing of the proteins into preparations that can be used pharmaceutically. Proper formulation is dependent upon the route of administration chosen.

[0561] The TNF family ligand trimer-containing antigen binding molecules may be formulated into a composition in a free acid or base, neutral or salt form. Pharmaceutically acceptable salts are salts that substantially retain the biological activity of the free acid or base. These include the acid addition salts, e.g. those formed with the free amino groups of a proteinaceous composition, or which are formed with inorganic acids such as for example, hydrochloric or phosphoric acids, or such organic acids as acetic, oxalic, tartaric or mandelic acid. Salts formed with the free carboxyl groups can also be derived from inorganic bases such as for example, sodium, potassium, ammonium, calcium or ferric hydroxides; or such organic bases as isopropylamine, trimethylamine, histidine or procaine. Pharmaceutical salts tend to be more soluble in aqueous and other protic solvents than are the corresponding free base forms.

[0562] The composition herein may also contain more than one active ingredients as necessary for the particular indication being treated, preferably those with complementary activities that do not adversely affect each other. Such active ingredients are suitably present in combination in amounts that are effective for the purpose intended.

[0563] The formulations to be used for in vivo administration are generally sterile. Sterility may be readily accomplished, e.g., by filtration through sterile filtration membranes.

[0564] Therapeutic Methods and Compositions

[0565] Any of the TNF family ligand trimer-containing antigen binding molecules provided herein may be used in therapeutic methods.

[0566] For use in therapeutic methods, TNF family ligand trimer-containing antigen binding molecules of the invention can be formulated, dosed, and administered in a fashion consistent with good medical practice. Factors for consideration in this context include the particular disorder being treated, the particular mammal being treated, the clinical condition of the individual patient, the cause of the disorder, the site of delivery of the agent, the method of administration, the scheduling of administration, and other factors known to medical practitioners.

[0567] In one aspect, TNF family ligand trimer-containing antigen binding molecules of the invention for use as a medicament are provided. In further aspects, TNF family ligand trimer-containing antigen binding molecules of the invention for use in treating a disease, in particular for use in the treatment of cancer, are provided. In certain aspects, TNF family ligand trimer-containing antigen binding molecules of the invention for use in a method of treatment are provided. In one aspect, the invention provides a TNF family ligand trimer-containing antigen binding molecule as described herein for use in the treatment of a disease in an individual in need thereof. In certain aspects, the invention provides a TNF family ligand trimer-containing antigen binding molecule for use in a method of treating an individual having a disease comprising administering to the individual a therapeutically effective amount of the fusion protein. In certain aspects, the disease to be treated is cancer. Examples of cancers include solid tumors, bladder cancer, renal cell carcinoma, brain cancer, head and neck cancer, pancreatic cancer, lung cancer, breast cancer, ovarian cancer, uterine cancer, cervical cancer, endometrial cancer, esophageal cancer, colon cancer, colorectal cancer, rectal cancer, gastric cancer, prostate cancer, blood cancer, skin cancer, squamous cell carcinoma, bone cancer, and kidney cancer, melanoma, B-cell lymphoma, B-cell leukemia, non-Hodgkin lymphoma and acute lymphoblastic leukemia. Thus, a TNF family ligand trimer-containing antigen binding molecule as described herein for use in the treatment of cancer is provided. The subject, patient, or “individual” in need of treatment is typically a mammal, more specifically a human.

[0568] In another aspect, provided is a TNF family ligand trimer-containing antigen binding molecule as described herein for use in the treatment of infectious diseases, in particular for the treatment of viral infections. In a further aspect, provided is a TNF family ligand trimer-containing antigen binding molecule as described herein for use in the treatment of autoimmune diseases such as for example Lupus disease.

[0569] In one aspect, provided is a TNF family ligand trimer-containing antigen binding molecule according to the invention for use in treating head and neck squamous cell carcinoma (HNSCC), breast cancer, colorectal cancer (CRC), pancreatic cancer (PAC), gastric cancer, non-small-cell lung carcinoma (NSCLC) and Mesothelioma, wherein the target cell antigen is FAP.

[0570] In a further aspect, the invention relates to the use of a TNF family ligand trimer-containing antigen binding molecule in the manufacture or preparation of a medicament for the treatment of a disease in an individual in need thereof. In one aspect, the medicament is for use in a method of treating a disease comprising administering to an individual having the disease a therapeutically effective amount of the medicament. In certain embodiments the disease to be treated is a proliferative disorder, particularly cancer. Thus, in one aspect, the invention relates to the use of a TNF family ligand trimer-containing antigen binding molecule of the invention in the manufacture or preparation of a medicament for the treatment of cancer. Examples of cancers include solid tumors, bladder cancer, renal cell carcinoma, brain cancer, head and neck cancer, pancreatic cancer, lung cancer, breast cancer, ovarian cancer, uterine cancer, cervical cancer, endometrial cancer, esophageal cancer, colon cancer, colorectal cancer, rectal cancer, gastric cancer, prostate cancer, blood cancer, skin cancer, squamous cell carcinoma, bone cancer, and kidney cancer, melanoma, B-cell lymphoma, B-cell leukemia, non-Hodgkin lymphoma and acute lymphoblastic leukemia. Other cell proliferation disorders that can be treated using a TNF family ligand trimer-containing antigen binding molecule of the present invention include, but are not limited to neoplasms located in the: abdomen, bone, breast, digestive system, liver, pancreas, peritoneum, endocrine glands (adrenal, parathyroid, pituitary, testicles, ovary, thymus, thyroid), eye, head and neck, nervous system (central and peripheral), lymphatic system, pelvic, skin, soft tissue, spleen, thoracic region, and urogenital system. Also included are pre-cancerous conditions or lesions and cancer metastases. In certain embodiments the cancer is chosen from the group consisting of renal cell cancer, skin cancer, lung cancer, colorectal cancer, breast cancer, brain cancer, head and neck cancer. A skilled artisan may recognize that in some cases the TNF family ligand trimer-containing antigen binding molecule may not provide a cure but may only provide partial benefit. In some aspects, a physiological change having some benefit is also considered therapeutically beneficial. Thus, in some aspects, an amount of TNF family ligand trimer-containing antigen binding molecule that provides a physiological change is considered an “effective amount” or a “therapeutically effective amount”.

[0571] In a further aspect, the invention relates to the use of a TNF family ligand trimer-containing antigen binding molecule as described herein in the manufacture or preparation of a medicament for the treatment of infectious diseases, in particular for the treatment of viral infections or for the treatment of autoimmune diseases, for example Lupus disease.

[0572] In a further aspect, the invention provides a method for treating a disease in an individual, comprising administering to said individual a therapeutically effective amount of a TNF family ligand trimer-containing antigen binding molecule of the invention. In one aspect a composition is administered to said individual, comprising a fusion protein of the invention in a pharmaceutically acceptable form. In certain aspects, the disease to be treated is a proliferative disorder. In a particular aspect, the disease is cancer. In another aspect, the disease is an infectious disease or an autoimmune disease. In certain aspects, the method further comprises administering to the individual a therapeutically effective amount of at least one additional therapeutic agent, e.g. an anti-cancer agent if the disease to be treated is cancer. An “individual” according to any of the above embodiments may be a mammal, preferably a human.

[0573] For the prevention or treatment of disease, the appropriate dosage of a TNF family ligand trimer-containing antigen binding molecule of the invention (when used alone or in combination with one or more other additional therapeutic agents) will depend on the type of disease to be treated, the route of administration, the body weight of the patient, the type of fusion protein, the severity and course of the disease, whether the fusion protein is administered for preventive or therapeutic purposes, previous or concurrent therapeutic interventions, the patient's clinical history and response to the fusion protein, and the discretion of the attending physician. The practitioner responsible for administration will, in any event, determine the concentration of active ingredient(s) in a composition and appropriate dose(s) for the individual subject. Various dosing schedules including but not limited to single or multiple administrations over various time-points, bolus administration, and pulse infusion are contemplated herein.

[0574] The TNF family ligand trimer-containing antigen binding molecule is suitably administered to the patient at one time or over a series of treatments. Depending on the type and severity of the disease, about 1 μg/kg to 15 mg/kg (e.g. 0.1 mg/kg-10 mg/kg) of TNF family ligand trimer-containing antigen binding molecule can be an initial candidate dosage for administration to the patient, whether, for example, by one or more separate administrations, or by continuous infusion. One typical daily dosage might range from about 1 μg/kg to 100 mg/kg or more, depending on the factors mentioned above. For repeated administrations over several days or longer, depending on the condition, the treatment would generally be sustained until a desired suppression of disease symptoms occurs. One exemplary dosage of the fusion protein would be in the range from about 0.005 mg/kg to about 10 mg/kg. In other examples, a dose may also comprise from about 1 μg/kg body weight, about 5 μg/kg body weight, about 10 μg/kg body weight, about 50 μg/kg body weight, about 100 μg/kg body weight, about 200 μg/kg body weight, about 350 μg/kg body weight, about 500 μg/kg body weight, about 1 mg/kg body weight, about 5 mg/kg body weight, about 10 mg/kg body weight, about 50 mg/kg body weight, about 100 mg/kg body weight, about 200 mg/kg body weight, about 350 mg/kg body weight, about 500 mg/kg body weight, to about 1000 mg/kg body weight or more per administration, and any range derivable therein. In examples of a derivable range from the numbers listed herein, a range of about 5 mg/kg body weight to about 100 mg/kg body weight, about 5 μg/kg body weight to about 500 mg/kg body weight etc., can be administered, based on the numbers described above. Thus, one or more doses of about 0.5 mg/kg, 2.0 mg/kg, 5.0 mg/kg or 10 mg/kg (or any combination thereof) may be administered to the patient. Such doses may be administered intermittently, e.g. every week or every three weeks (e.g. such that the patient receives from about two to about twenty, or e.g. about six doses of the fusion protein). An initial higher loading dose, followed by one or more lower doses may be administered. However, other dosage regimens may be useful. The progress of this therapy is easily monitored by conventional techniques and assays.

[0575] The TNF family ligand trimer-containing antigen binding molecules of the invention will generally be used in an amount effective to achieve the intended purpose. For use to treat or prevent a disease condition, the TNF family ligand trimer-containing antigen binding molecules of the invention, or pharmaceutical compositions thereof, are administered or applied in a therapeutically effective amount. Determination of a therapeutically effective amount is well within the capabilities of those skilled in the art, especially in light of the detailed disclosure provided herein.

[0576] For systemic administration, a therapeutically effective dose can be estimated initially from in vitro assays, such as cell culture assays. A dose can then be formulated in animal models to achieve a circulating concentration range that includes the IC50 as determined in cell culture. Such information can be used to more accurately determine useful doses in humans.

[0577] Initial dosages can also be estimated from in vivo data, e.g., animal models, using techniques that are well known in the art. One having ordinary skill in the art could readily optimize administration to humans based on animal data.

[0578] Dosage amount and interval may be adjusted individually to provide plasma levels of the TNF family ligand trimer-containing antigen binding molecules which are sufficient to maintain therapeutic effect. Usual patient dosages for administration by injection range from about 0.1 to 50 mg/kg/day, typically from about 0.5 to 1 mg/kg/day. Therapeutically effective plasma levels may be achieved by administering multiple doses each day. Levels in plasma may be measured, for example, by HPLC.

[0579] In cases of local administration or selective uptake, the effective local concentration of the TNF family ligand trimer-containing antigen binding molecule may not be related to plasma concentration. One skilled in the art will be able to optimize therapeutically effective local dosages without undue experimentation.

[0580] A therapeutically effective dose of the TNF family ligand trimer-containing antigen binding molecules described herein will generally provide therapeutic benefit without causing substantial toxicity. Toxicity and therapeutic efficacy of a fusion protein can be determined by standard pharmaceutical procedures in cell culture or experimental animals. Cell culture assays and animal studies can be used to determine the LD₅₀ (the dose lethal to 50% of a population) and the ED₅₀ (the dose therapeutically effective in 50% of a population). The dose ratio between toxic and therapeutic effects is the therapeutic index, which can be expressed as the ratio LD₅₀/ED₅₀. TNF family ligand trimer-containing antigen binding molecules that exhibit large therapeutic indices are preferred. In one embodiment, the TNF family ligand trimer-containing antigen binding molecule according to the present invention exhibits a high therapeutic index. The data obtained from cell culture assays and animal studies can be used in formulating a range of dosages suitable for use in humans. The dosage lies preferably within a range of circulating concentrations that include the ED₅₀ with little or no toxicity. The dosage may vary within this range depending upon a variety of factors, e.g., the dosage form employed, the route of administration utilized, the condition of the subject, and the like. The exact formulation, route of administration and dosage can be chosen by the individual physician in view of the patient's condition (see, e.g., Fingl et al., 1975, in: The Pharmacological Basis of Therapeutics, Ch. 1, p. 1, incorporated herein by reference in its entirety).

[0581] The attending physician for patients treated with fusion proteins of the invention would know how and when to terminate, interrupt, or adjust administration due to toxicity, organ dysfunction, and the like. Conversely, the attending physician would also know to adjust treatment to higher levels if the clinical response were not adequate (precluding toxicity). The magnitude of an administered dose in the management of the disorder of interest will vary with the severity of the condition to be treated, with the route of administration, and the like. The severity of the condition may, for example, be evaluated, in part, by standard prognostic evaluation methods. Further, the dose and perhaps dose frequency will also vary according to the age, body weight, and response of the individual patient.

[0582] Other Agents and Treatments

[0583] The TNF family ligand trimer-containing antigen binding molecules of the invention may be administered in combination with one or more other agents in therapy. For instance, a fusion protein of the invention may be co-administered with at least one additional therapeutic agent. The term “therapeutic agent” encompasses any agent that can be administered for treating a symptom or disease in an individual in need of such treatment. Such additional therapeutic agent may comprise any active ingredients suitable for the particular indication being treated, preferably those with complementary activities that do not adversely affect each other. In certain embodiments, an additional therapeutic agent is another anti-cancer agent or immunotherapy.

[0584] Such other agents are suitably present in combination in amounts that are effective for the purpose intended. The effective amount of such other agents depends on the amount of fusion protein used, the type of disorder or treatment, and other factors discussed above. The TNF family ligand trimer-containing antigen binding molecules are generally used in the same dosages and with administration routes as described herein, or about from 1 to 99% of the dosages described herein, or in any dosage and by any route that is empirically/clinically determined to be appropriate.

[0585] Such combination therapies noted above encompass combined administration (where two or more therapeutic agents are included in the same or separate compositions), and separate administration, in which case, administration of the TNF family ligand trimer-containing antigen binding molecule of the invention can occur prior to, simultaneously, and/or following, administration of the additional therapeutic agent and/or adjuvant.

[0586] Articles of Manufacture

[0587] In another aspect of the invention, an article of manufacture containing materials useful for the treatment, prevention and/or diagnosis of the disorders described above is provided. The article of manufacture comprises a container and a label or package insert on or associated with the container. Suitable containers include, for example, bottles, vials, syringes, IV solution bags, etc. The containers may be formed from a variety of materials such as glass or plastic. The container holds a composition which is by itself or combined with another composition effective for treating, preventing and/or diagnosing the condition and may have a sterile access port (for example the container may be an intravenous solution bag or a vial having a stopper that is pierceable by a hypodermic injection needle). At least one active agent in the composition is a TNF ligand trimer-containing antigen binding molecule of the invention.

[0588] The label or package insert indicates that the composition is used for treating the condition of choice. Moreover, the article of manufacture may comprise (a) a first container with a composition contained therein, wherein the composition comprises a TNF ligand trimer-containing antigen binding molecule of the invention; and (b) a second container with a composition contained therein, wherein the composition comprises a further cytotoxic or otherwise therapeutic agent. The article of manufacture in this embodiment of the invention may further comprise a package insert indicating that the compositions can be used to treat a particular condition.

[0589] Alternatively, or additionally, the article of manufacture may further comprise a second (or third) container comprising a pharmaceutically-acceptable buffer, such as bacteriostatic water for injection (BWFI), phosphate-buffered saline, Ringer's solution and dextrose solution. It may further include other materials desirable from a commercial and user standpoint, including other buffers, diluents, filters, needles, and syringes.

TABLE C
(Sequences):

| SEQ ID | | |
|---|---|---|
| NO: | Name | Sequence |
| 1 | Human (hu) 4-1BBL (71- | REGPELSPDDPAGLLDLRQGMFAQLVAQNVLLIDG |
| | 254) | PLSWYSDPGLAGVSLTGGLSYKEDTKELVVAKAGV |
| | | YYVFFQLELRRVVAGEGSGSVSLALHLQPLRSAAG |
| | | AAALALTVDLPPASSEARNSAFGFQGRLLHLSAGQ |
| | | RLGVHLHTEARARHAWQLTQGATVLGLFRVTPEIP |
| | | AGLPSPRSE |
| 2 | hu 4-1BBL (85-254) | LDLRQGMFAQLVAQNVLLIDGPLSWYSDPGLAGVS |
| | | LTGGLSYKEDTKELVVAKAGVYYVFFQLELRRVV |
| | | AGEGSGSVSLALHLQPLRSAAGAAALALTVDLPPA |
| | | SSEARNSAFGFQGRLLHLSAGQRLGVHLHTEARAR |
| | | HAWQLTQGATVLGLFRVTPEIPAGLPSPRSE |
| 3 | hu 4-1BBL (80-254) | DPAGLLDLRQGMFAQLVAQNVLLIDGPLSWYSDPG |
| | | LAGVSLTGGLSYKEDTKELVVAKAGVYYVFFQLEL |
| | | RRVVAGEGSGSVSLALHLQPLRSAAGAAALALTVD |
| | | LPPASSEARNSAFGFQGRLLHLSAGQRLGVHLHTEA |
| | | RARHAWQLTQGATVLGLFRVTPEIPAGLPSPRSE |
| 4 | hu 4-1BBL (52-254) | PWAVSGARASPGSAASPRLREGPELSPDDPAGLLDL |
| | | RQGMFAQLVAQNVLLIDGPLSWYSDPGLAGVSLTG |
| | | GLSYKEDTKELVVAKAGVYYVFFQLELRRVVAGE |
| | | GSGSVSLALHLQPLRSAAGAAALALTVDLPPASSEA |
| | | RNSAFGFQGRLLHLSAGQRLGVHLHTEARARHAW |
| | | QLTQGATVLGLFRVTPEIPAGLPSPRSE |
| 5 | hu 4-1BBL (71-248) | REGPELSPDDPAGLLDLRQGMFAQLVAQNVLLIDG |
| | | PLSWYSDPGLAGVSLTGGLSYKEDTKELVVAKAGV |
| | | YYVFFQLELRRVVAGEGSGSVSLALHLQPLRSAAG |
| | | AAALALTVDLPPASSEARNSAFGFQGRLLHLSAGQ |
| | | RLGVHLHTEARARHAWQLTQGATVLGLFRVTPEIP |
| | | AGL |
| 6 | hu 4-1BBL (85-248) | LDLRQGMFAQLVAQNVLLIDGPLSWYSDPGLAGVS |
| | | LTGGLSYKEDTKELVVAKAGVYYVFFQLELRRVV |
| | | AGEGSGSVSLALHLQPLRSAAGAAALALTVDLPPA |
| | | SSEARNSAFGFQGRLLHLSAGQRLGVHLHTEARAR |
| | | HAWQLTQGATVLGLFRVTPEIPAGL |
| 7 | hu 4-1BBL (80-248) | DPAGLLDLRQGMFAQLVAQNVLLIDGPLSWYSDPG |
| | | LAGVSLTGGLSYKEDTKELVVAKAGVYYVFFQLEL |
| | | RRVVAGEGSGSVSLALHLQPLRSAAGAAALALTVD |
| | | LPPASSEARNSAFGFQGRLLHLSAGQRLGVHLHTEA |
| | | RARHAWQLTQGATVLGLFRVTPEIPAGL |
| 8 | hu 4-1BBL (52-248) | PWAVSGARASPGSAASPRLREGPELSPDDPAGLLDL |
| | | RQGMFAQLVAQNVLLIDGPLSWYSDPGLAGVSLTG |
| | | GLSYKEDTKELVVAKAGVYYVFFQLELRRVVAGE |
| | | GSGSVSLALHLQPLRSAAGAAALALTVDLPPASSEA |
| | | RNSAFGFQGRLLHLSAGQRLGVHLHTEARARHAW |
| | | QLTQGATVLGLFRVTPEIPAGL |
| 9 | dimeric hu 4-1BBL (71-254) | REGPELSPDDPAGLLDLRQGMFAQLVAQNVLLIDG |
| | connected by (G4S)₂ linker | PLSWYSDPGLAGVSLTGGLSYKEDTKELVVAKAGV |
| | | YYVFFQLELRRVVAGEGSGSVSLALHLQPLRSAAG |
| | | AAALALTVDLPPASSEARNSAFGFQGRLLHLSAGQ |
| | | RLGVHLHTEARARHAWQLTQGATVLGLFRVTPEIP |
| | | AGLPSPRSEGGGGSGGGGSREGPELSPDDPAGLLDL |
| | | RQGMFAQLVAQNVLLIDGPLSWYSDPGLAGVSLTG |
| | | GLSYKEDTKELVVAKAGVYYVFFQLELRRVVAGE |
| | | GSGSVSLALHLQPLRSAAGAAALALTVDLPPASSEA |
| | | RNSAFGFQGRLLHLSAGQRLGVHLHTEARARHAW |
| | | QLTQGATVLGLFRVTPEIPAGLPSPRSE |
| 10 | dimeric hu 4-1BBL (71-248) | REGPELSPDDPAGLLDLRQGMFAQLVAQNVLLIDG |
| | connected by (G4S)₂ linker | PLSWYSDPGLAGVSLTGGLSYKEDTKELVVAKAGV |
| | | YYVFFQLELRRVVAGEGSGSVSLALHLQPLRSAAG |
| | | AAALALTVDLPPASSEARNSAFGFQGRLLHLSAGQ |
| | | RLGVHLHTEARARHAWQLTQGATVLGLFRVTPEIP |
| | | AGLGGGGSGGGGSREGPELSPDDPAGLLDLRQGMF |
| | | AQLVAQNVLLIDGPLSWYSDPGLAGVSLTGGLSYK |
| | | EDTKELVVAKAGVYYVFFQLELRRVVAGEGSGSVS |
| | | LALHLQPLRSAAGAAALALTVDLPPASSEARNSAF |
| | | GFQGRLLHLSAGQRLGVHLHTEARARHAWQLTQG |
| | | ATVLGLFRVTPEIPAGL |
| 11 | hu OX40L (51-183) | QVSHRYPRIQSIKVQFTEYKKEKGFILTSQKEDEIMK |
| | | VQNNSVIINCDGFYLISLKGYFSQEVNISLHYQKDEE |
| | | PLFQLKKVRSVNSLMVASLTYKDKVYLNVTTDNTS |
| | | LDDFHVNGGELILIHQNPGEFCVL |
| 12 | hu OX40L (52-183) | VSHRYPRIQSIKVQFTEYKKEKGFILTSQKEDEIMKV |
| | | QNNSVIINCDGFYLISLKGYFSQEVNISLHYQKDEEP |
| | | LFQLKKVRSVNSLMVASLTYKDKVYLNVTTDNTSL |
| | | DDFHVNGGELILIHQNPGEFCVL |
| 13 | FAP(28H1) CDR-H1 | SHAMS |
| 14 | FAP(28H1) CDR-H2 | AIWASGEQYYADSVKG |
| 15 | FAP(28H1) CDR-H3 | GWLGNFDY |
| 16 | FAP(28H1) CDR-L1 | RASQSVSRSYLA |
| 17 | FAP(28H1) CDR-L2 | GASTRAT |
| 18 | FAP(28H1) CDR-L3 | QQGQVIPPT |
| 19 | FAP(4B9) CDR-H1 | SYAMS |
| 20 | FAP(4B9) CDR-H2 | AIIGSGASTYYADSVKG |
| 21 | FAP(4B9) CDR-H3 | GWFGGFNY |
| 22 | FAP(4B9) CDR-L1 | RASQSVTSSYLA |
| 23 | FAP(4B9) CDR-L2 | VGSRRAT |
| 24 | FAP(4B9) CDR-L3 | QQGIMLPPT |
| 25 | FAP(28H1) VH | EVQLLESGGGLVQPGGSLRLSCAASGFTFSSHAMS |
| | | WVRQAPGKGLEWVSAIWASGEQYYADSVKGRFTI |
| | | SRDNSKNTLYLQMNSLRAEDTAVYYCAKGWLGNF |
| | | DYWGQGTLVTVSS |
| 26 | FAP(28H1) VL | EIVLTQSPGTLSLSPGERATLSCRASQSVSRSYLAW |
| | | YQQKPGQAPRLLIIGASTRATGIPDRFSGSGSGTDFT |
| | | LTISRLEPEDFAVYYCQQGQVIPPTFGQGTKVEIK |
| 27 | FAP(4B9) VH | EVQLLESGGGLVQPGGSLRLSCAASGFTFSSYAMS |
| | | WVRQAPGKGLEWVSAIIGSGASTYYADSVKGRFTI |
| | | SRDNSKNTLYLQMNSLRAEDTAVYYCAKGWFGGF |
| | | NYWGQGTLVTVSS |
| 28 | FAP(4B9) VL | EIVLTQSPGTLSLSPGERATLSCRASQSVTSSYLAWY |
| | | QQKPGQAPRLLINVGSRRATGIPDRFSGSGSGTDFT |
| | | LTISRLEPEDFAVYYCQQGIMLPPTFGQGTKVEIK |
| 29 | CD19 (8B8-018) CDR-H1 | DYIMH |
| 30 | CD19 (8B8-018) CDR-H2 | YINPYNDGSKYTEKFQG |
| 31 | CD19 (8B8-018) CDR-H3 | GTYYYGSALFDY |
| 32 | CD19 (8B8-018) CDR-L1 | KSSQSLENPNGNTYLN |
| 33 | CD19 (8B8-018) CDR-L2 | RVSKRFS |
| 34 | CD19 (8B8-018) CDR-L3 | LQLTHVPYT |
| 35 | CD19 (8B8-2B11) CDR-H1 | DYIMH |
| 36 | CD19 (8B8-2B11) CDR-H2 | YINPYNDGSKYTEKFQG |
| 37 | CD19 (8B8-2B11) CDR-H3 | GTYYYGPQLFDY |
| 38 | CD19 (8B8-2B11) CDR-L1 | KSSQSLETSTGTTYLN |
| 39 | CD19 (8B8-2B11) CDR-L2 | RVSKRFS |
| 40 | CD19 (8B8-2B11) CDR-H3 | LQLLEDPYT |
| 41 | CD19 (8B8-018) VH | QVQLVQSGAEVKKPGASVKVSCKASGYTFTDYIM |
| | | HWVRQAPGQGLEWMGYINPYNDGSKYTEKFQGR |
| | | VTMTSDTSISTAYMELSRLRSDDTAVYYCARGTYY |
| | | YGSALFDYWGQGTTVTVSS |
| 42 | CD19 (8B8-018) VL | DIVMTQTPLSLSVTPGQPASISCKSSQSLENPNGNTY |
| | | LNWYLQKPGQSPQLLIYRVSKRFSGVPDRFSGSGSG |
| | | TDFTLKISRVEAEDVGVYYCLQLTHVPYTFGQGTK |
| | | LEIK |
| 43 | CD19 (8B8-2B11) VH | QVQLVQSGAEVKKPGASVKVSCKASGYTFTDYIM |
| | | HWVRQAPGQGLEWMGYINPYNDGSKYTEKFQGR |
| | | VTMTSDTSISTAYMELSRLRSDDTAVYYCARGTYY |
| | | YGPQLFDYWGQGTTVTVSS |
| 44 | CD19 (8B8-2B11) VL | DIVMTQTPLSLSVTPGQPASISCKSSQSLETSTGTTY |
| | | LNWYLQKPGQSPQLLIYRVSKRFSGVPDRFSGSGSG |
| | | TDFTLKISRVEAEDVGVYYCLQLLEDPYTFGQGTKL |
| | | EIK |
| 45 | CEA CDR-H1 | DTYMH |
| 46 | CEA CDR-H2 | RIDPANGNSKYVPKFQG |
| 47 | CEA CDR-H3 | FGYYVSDYAMAY |
| 48 | CEA CDR-L1 | RAGESVDIFGVGFLH |
| 49 | CEA CDR-L2 | RASNRAT |
| 50 | CEA CDR-L3 | QQTNEDPYT |
| 51 | Humanized CEA binder VH | QVQLVQSGAEVKKPGSSVKVSCKASGFNIKDTYMH |
| | | WVRQAPGQGLEWMGRIDPANGNSKYVPKFQGRVT |
| | | ITADTSTSTAYMELSSLRSEDTAVYYCAPFGYYVSD |
| | | YAMAYWGQGTLVTVSS |
| 52 | Humanized CEA binder VL | EIVLTQSPATLSLSPGERATLSCRAGESVDIFGVGFL |
| | | HWYQQKPGQAPRLLIYRASNRATGIPARFSGSGSGT |
| | | DFTLTISSLEPEDFAVYYCQQTNEDPYTFGQGTKLEIK |
| 53 | Human (hu) FAP | UniProt no. Q12884 |
| 54 | hu FAP ectodomain + poly- | RPSRVHNSEENTMRALTLKDILNGTFSYKTFFPNWI |
| | lys-tag + his₆-tag | SGQEYLHQSADNNIVLYNIETGQSYTILSNRTMKSV |
| | | NASNYGLSPDRQFVYLESDYSKLWRYSYTATYYIY |
| | | DLSNGEFVRGNELPRPIQYLCWSPVGSKLAYVYQN |
| | | NIYLKQRPGDPPFQITFNGRENKIFNGIPDWVYEEE |
| | | MLATKYALWWSPNGKFLAYAEFNDTDIPVIAYSYY |
| | | GDEQYPRTINIPYPKAGAKNPVVRIFIIDTTYPAYVG |
| | | PQEVPVPAMIASSDYYFSWLTWVTDERVCLQWLK |
| | | RVQNVSVLSICDFREDWQTWDCPKTQEHIEESRTG |
| | | WAGGFFVSTPVFSYDAISYYKIFSDKDGYKHIHYIK |
| | | DTVENAIQITSGKWEAINIFRVTQDSLFYSSNEFEEY |
| | | PGRRNIYRISIGSYPPSKKCVTCHLRKERCQYYTASF |
| | | SDYAKYYALVCYGPGIPISTLHDGRTDQEIKILEENK |
| | | ELENALKNIQLPKEEIKKLEVDEITLWYKMILPPQFD |
| | | RSKKYPLLIQVYGGPCSQSVRSVFAVNWISYLASKE |
| | | GMVIALVDGRGTAFQGDKLLYAVYRKLGVYEVED |
| | | QITAVRKFIEMGFIDEKRIAIWGWSYGGYVSSLALA |
| | | SGTGLFKCGIAVAPVSSWEYYASVYTERFMGLPTK |
| | | DDNLEHYKNSTVMARAEYFRNVDYLLIHGTADDN |
| | | VHFQNSAQIAKALVNAQVDFQAMWYSDQNHGLSG |
| | | LSTNHLYTHMTHFLKQCFSLSDGKKKKKKGHHHH |
| | | HH |
| 55 | nucleotide sequence of hu | CGCCCTTCAAGAGTTCATAACTCTGAAGAAAATA |
| | FAP ectodomain + poly-lys- | CAATGAGAGCACTCACACTGAAGGATATTTTAAA |
| | tag + hi56-tag | TG |
| | | GAACATTTTCTTATAAAACATTTTTTCCAAACTGG |
| | | ATTTCAGGACAAGAATATCTTCATCAATCTGCAG |
| | | ATAACAATATAGTACTTTATAATATTGAAACAGG |
| | | ACAATCATATACCATTTTGAGTAATAGAACCATG |
| | | AAAAGTGTGAATGCTTCAAATTACGGCTTATCAC |
| | | CTGATCGGCAATTTGTATATCTAGAAAGTGATTA |
| | | TTCAAAGCTTTGGAGATACTCTTACACAGCAACA |
| | | TATTACATCTATGACCTTAGCAATGGAGAATTTG |
| | | TAAGAGGAAATGAGCTTCCTCGTCCAATTCAGTA |
| | | TTTATGCTGGTCGCCTGTTGGGAGTAAATTAGCA |
| | | TATGTCTATCAAAACAATATCTATTTGAAACAAA |
| | | GACCAGGAGATCCACCTTTTCAAATAACATTTAA |
| | | TGGAAGAGAAAATAAAATATTTAATGGAATCCCA |
| | | GACTGGGTTTATGAAGAGGAAATGCTTGCTACAA |
| | | AATATGCTCTCTGGTGGTCTCCTAATGGAAAATTT |
| | | TTGGCATATGCGGAATTTAATGATACGGATATAC |
| | | CAGTTATTGCCTATTCCTATTATGGCGATGAACA |
| | | ATATCCTAGAACAATAAATATTCCATACCCAAAG |
| | | GCTGGAGCTAAGAATCCCGTTGTTCGGATATTTA |
| | | TTATCGATACCACTTACCCTGCGTATGTAGGTCCC |
| | | CAGGAAGTGCCTGTTCCAGCAATGATAGCCTCAA |
| | | GTGATTATTATTTCAGTTGGCTCACGTGGGTTACT |
| | | GATGAACGAGTATGTTTGCAGTGGCTAAAAAGAG |
| | | TCCAGAATGTTTCGGTCCTGTCTATATGTGACTTC |
| | | AGGGAAGACTGGCAGACATGGGATTGTCCAAAG |
| | | ACCCAGGAGCATATAGAAGAAAGCAGAACTGGA |
| | | TGGGCTGGTGGATTCTTTGTTTCAACACCAGTTTT |
| | | CAGCTATGATGCCATTTCGTACTACAAAATATTT |
| | | AGTGACAAGGATGGCTACAAACATATTCACTATA |
| | | TCAAAGACACTGTGGAAAATGCTATTCAAATTAC |
| | | AAGTGGCAAGTGGGAGGCCATAAATATATTCAG |
| | | AGTAACACAGGATTCACTGTTTTATTCTAGCAAT |
| | | GAATTTGAAGAATACCCTGGAAGAAGAAACATCT |
| | | ACAGAATTAGCATTGGAAGCTATCCTCCAAGCAA |
| | | GAAGTGTGTTACTTGCCATCTAAGGAAAGAAAGG |
| | | TGCCAATATTACACAGCAAGTTTCAGCGACTACG |
| | | CCAAGTACTATGCACTTGTCTGCTACGGCCCAGG |
| | | CATCCCCATTTCCACCCTTCATGATGGACGCACTG |
| | | ATCAAGAAATTAAAATCCTGGAAGAAAACAAGG |
| | | AATTGGAAAATGCTTTGAAAAATATCCAGCTGCC |
| | | TAAAGAGGAAATTAAGAAACTTGAAGTAGATGA |
| | | AATTACTTTATGGTACAAGATGATTCTTCCTCCTC |
| | | AATTTGACAGATCAAAGAAGTATCCCTTGCTAAT |
| | | TCAAGTGTATGGTGGTCCCTGCAGTCAGAGTGTA |
| | | AGGTCTGTATTTGCTGTTAATTGGATATCTTATCT |
| | | TGCAAGTAAGGAAGGGATGGTCATTGCCTTGGTG |
| | | GATGGTCGAGGAACAGCTTTCCAAGGTGACAAAC |
| | | TCCTCTATGCAGTGTATCGAAAGCTGGGTGTTTAT |
| | | GAAGTTGAAGACCAGATTACAGCTGTCAGAAAAT |
| | | TCATAGAAATGGGTTTCATTGATGAAAAAAGAAT |
| | | AGCCATATGGGGCTGGTCCTATGGAGGATACGTT |
| | | TCATCACTGGCCCTTGCATCTGGAACTGGTCTTTT |
| | | CAAATGTGGTATAGCAGTGGCTCCAGTCTCCAGC |
| | | TGGGAATATTACGCGTCTGTCTACACAGAGAGAT |
| | | TCATGGGTCTCCCAACAAAGGATGATAATCTTGA |
| | | GCACTATAAGAATTCAACTGTGATGGCAAGAGCA |
| | | GAATATTTCAGAAATGTAGACTATCTTCTCATCC |
| | | ACGGAACAGCAGATGATAATGTGCACTTTCAAAA |
| | | CTCAGCACAGATTGCTAAAGCTCTGGTTAATGCA |
| | | CAAGTGGATTTCCAGGCAATGTGGTACTCTGACC |
| | | AGAACCACGGCTTATCCGGCCTGTCCACGAACCA |
| | | CTTATACACCCACATGACCCACTTCCTAAAGCAG |
| | | TGTTTCTCTTTGTCAGACGGCAAAAAGAAAAAGA |
| | | AAAAGGGCCACCACCATCACCATCAC |
| 56 | mouse FAP | UniProt no. P97321 |
| 57 | Murine FAP | RPSRVYKPEGNTKRALTLKDILNGTFSYKTYFPNWI |
| | ectodomain + poly-lys- | SEQEYLHQSEDDNIVFYNIETRESYIILSNSTMKSVN |
| | tag + his₆-tag | ATDYGLSPDRQFVYLESDYSKLWRYSYTATYYIYD |
| | | LQNGEFVRGYELPRPIQYLCWSPVGSKLAYVYQNN |
| | | IYLKQRPGDPPFQITYTGRENRIFNGIPDWVYEEEML |
| | | ATKYALWWSPDGKFLAYVEFNDSDIPIIAYSYYGD |
| | | GQYPRTINIPYPKAGAKNPVVRVFIVDTTYPHHVGP |
| | | MEVPVPEMIASSDYYFSWLTWVSSERVCLQWLKR |
| | | VQNVSVLSICDFREDWHAWECPKNQEHVEESRTG |
| | | WAGGFFVSTPAFSQDATSYYKIFSDKDGYKHIHYIK |
| | | DTVENAIQITSGKWEAIYIFRVTQDSLFYSSNEFEGY |
| | | PGRRNIYRISIGNSPPSKKCVTCHLRKERCQYYTASF |
| | | SYKAKYYALVCYGPGLPISTLHDGRTDQEIQVLEEN |
| | | KELENSLRNIQLPKVEIKKLKDGGLTFWYKMILPPQ |
| | | FDRSKKYPLLIQVYGGPCSQSVKSVFAVNWITYLAS |
| | | KEGIVIALVDGRGTAFQGDKFLHAVYRKLGVYEVE |
| | | DQLTAVRKFIEMGFIDEERIAIWGWSYGGYVSSLAL |
| | | ASGTGLFKCGIAVAPVSSWEYYASIYSERFMGLPTK |
| | | DDNLEHYKNSTVMARAEYFRNVDYLLIHGTADDN |
| | | VHFQNSAQIAKALVNAQVDFQAMWYSDQNHGILS |
| | | GRSQNHLYTHMTHFLKQCFSLSDGKKKKKKGHHH |
| | | HHH |
| 58 | nucleotide sequence of | CGTCCCTCAAGAGTTTACAAACCTGAAGGAAACA |
| | murine FAP | CAAAGAGAGCTCTTACCTTGAAGGATATTTTAAA |
| | ectodomain + poly-lys- | TGGAACATTCTCATATAAAACATATTTTCCCAACT |
| | tag + his₆-tag | GGATTTCAGAACAAGAATATCTTCATCAATCTGA |
| | | GGATGATAACATAGTATTTTATAATATTGAAACA |
| | | AGAGAATCATATATCATTTTGAGTAATAGCACCA |
| | | TGAAAAGTGTGAATGCTACAGATTATGGTTTGTC |
| | | ACCTGATCGGCAATTTGTGTATCTAGAAAGTGAT |
| | | TATTCAAAGCTCTGGCGATATTCATACACAGCGA |
| | | CATACTACATCTACGACCTTCAGAATGGGGAATT |
| | | TGTAAGAGGATACGAGCTCCCTCGTCCAATTCAG |
| | | TATCTATGCTGGTCGCCTGTTGGGAGTAAATTAG |
| | | CATATGTATATCAAAACAATATTTATTTGAAACA |
| | | AAGACCAGGAGATCCACCTTTTCAAATAACTTAT |
| | | ACTGGAAGAGAAAATAGAATATTTAATGGAATA |
| | | CCAGACTGGGTTTATGAAGAGGAAATGCTTGCCA |
| | | CAAAATATGCTCTTTGGTGGTCTCCAGATGGAAA |
| | | ATTTTTGGCATATGTAGAATTTAATGATTCAGATA |
| | | TACCAATTATTGCCTATTCTTATTATGGTGATGGA |
| | | CAGTATCCTAGAACTATAAATATTCCATATCCAA |
| | | AGGCTGGGGCTAAGAATCCGGTTGTTCGTGTTTT |
| | | TATTGTTGACACCACCTACCCTCACCACGTGGGC |
| | | CCAATGGAAGTGCCAGTTCCAGAAATGATAGCCT |
| | | CAAGTGACTATTATTTCAGCTGGCTCACATGGGT |
| | | GTCCAGTGAACGAGTATGCTTGCAGTGGCTAAAA |
| | | AGAGTGCAGAATGTCTCAGTCCTGTCTATATGTG |
| | | ATTTCAGGGAAGACTGGCATGCATGGGAATGTCC |
| | | AAAGAACCAGGAGCATGTAGAAGAAAGCAGAAC |
| | | AGGATGGGCTGGTGGATTCTTTGTTTCGACACCA |
| | | GCTTTTAGCCAGGATGCCACTTCTTACTACAAAA |
| | | TATTTAGCGACAAGGATGGTTACAAACATATTCA |
| | | CTACATCAAAGACACTGTGGAAAATGCTATTCAA |
| | | ATTACAAGTGGCAAGTGGGAGGCCATATATATAT |
| | | TCCGCGTAACACAGGATTCACTGTTTTATTCTAGC |
| | | AATGAATTTGAAGGTTACCCTGGAAGAAGAAAC |
| | | ATCTACAGAATTAGCATTGGAAACTCTCCTCCGA |
| | | GCAAGAAGTGTGTTACTTGCCATCTAAGGAAAGA |
| | | AAGGTGCCAATATTACACAGCAAGTTTCAGCTAC |
| | | AAAGCCAAGTACTATGCACTCGTCTGCTATGGCC |
| | | CTGGCCTCCCCATTTCCACCCTCCATGATGGCCGC |
| | | ACAGACCAAGAAATACAAGTATTAGAAGAAAAC |
| | | AAAGAACTGGAAAATTCTCTGAGAAATATCCAGC |
| | | TGCCTAAAGTGGAGATTAAGAAGCTCAAAGACG |
| | | GGGGACTGACTTTCTGGTACAAGATGATTCTGCC |
| | | TCCTCAGTTTGACAGATCAAAGAAGTACCCTTTG |
| | | CTAATTCAAGTGTATGGTGGTCCTTGTAGCCAGA |
| | | GTGTTAAGTCTGTGTTTGCTGTTAATTGGATAACT |
| | | TATCTCGCAAGTAAGGAGGGGATAGTCATTGCCC |
| | | TGGTAGATGGTCGGGGCACTGCTTTCCAAGGTGA |
| | | CAAATTCCTGCATGCCGTGTATCGAAAACTGGGT |
| | | GTATATGAAGTTGAGGACCAGCTCACAGCTGTCA |
| | | GAAAATTCATAGAAATGGGTTTCATTGATGAAGA |
| | | AAGAATAGCCATATGGGGCTGGTCCTACGGAGGT |
| | | TATGTTTCATCCCTGGCCCTTGCATCTGGAACTGG |
| | | TCTTTTCAAATGTGGCATAGCAGTGGCTCCAGTCT |
| | | CCAGCTGGGAATATTACGCATCTATCTACTCAGA |
| | | GAGATTCATGGGCCTCCCAACAAAGGACGACAAT |
| | | CTCGAACACTATAAAAATTCAACTGTGATGGCAA |
| | | GAGCAGAATATTTCAGAAATGTAGACTATCTTCT |
| | | CATCCACGGAACAGCAGATGATAATGTGCACTTT |
| | | CAGAACTCAGCACAGATTGCTAAAGCTTTGGTTA |
| | | ATGCACAAGTGGATTTCCAGGCGATGTGGTACTC |
| | | TGACCAGAACCATGGTATATTATCTGGGCGCTCC |
| | | CAGAATCATTTATATACCCACATGACGCACTTCC |
| | | TCAAGCAATGCTTTTCTTTATCAGACGGCAAAAA |
| | | GAAAAAGAAAAAGGGCCACCACCATCACCATCAC |
| 59 | Cynomolgus FAP | RPPRVHNSEENTMRALTLKDILNGTFSYKTFFPNWI |
| | ectodomain + poly-lys- | SGQEYLHQSADNNIVLYNIETGQSYTILSNRTMKSV |
| | tag + his₆-tag | NASNYGLSPDRQFVYLESDYSKLWRYSYTATYYIY |
| | | DLSNGEFVRGNELPRPIQYLCWSPVGSKLAYVYQN |
| | | NIYLKQRPGDPPFQITFNGRENKIFNGIPDWVYEEE |
| | | MLATKYALWWSPNGKFLAYAEFNDTDIPVIAYSYY |
| | | GDEQYPRTINIPYPKAGAKNPFVRIFIIDTTYPAYVG |
| | | PQEVPVPAMIASSDYYFSWLTWVTDERVCLQWLK |
| | | RVQNVSVLSICDFREDWQTWDCPKTQEHIEESRTG |
| | | WAGGFFVSTPVFSYDAISYYKIFSDKDGYKHIHYIK |
| | | DTVENAIQITSGKWEAINIFRVTQDSLFYSSNEFEDY |
| | | PGRRNIYRISIGSYPPSKKCVTCHLRKERCQYYTASF |
| | | SDYAKYYALVCYGPGIPISTLHDGRTDQEIKILEENK |
| | | ELENALKNIQLPKEEIKKLEVDEITLWYKMILPPQFD |
| | | RSKKYPLLIQVYGGPCSQSVRSVFAVNWISYLASKE |
| | | GMVIALVDGRGTAFQGDKLLYAVYRKLGVYEVED |
| | | QITAVRKFIEMGFIDEKRIAIWGWSYGGYVSSLALA |
| | | SGTGLFKCGIAVAPVSSWEYYASVYTERFMGLPTK |
| | | DDNLEHYKNSTVMARAEYFRNVDYLLIHGTADDN |
| | | VHFQNSAQIAKALVNAQVDFQAMWYSDQNHGLSG |
| | | LSTNHLYTHMTHFLKQCFSLSDGKKKKKKGHHHH |
| | | HH |
| 60 | nucleotide sequence of | CGCCCTCCAAGAGTTCATAACTCTGAAGAAAATA |
| | cynomolgus FAP | CAATGAGAGCACTCACACTGAAGGATATTTTAAA |
| | ectodomain + poly-lys- | TGGGACATTTTCTTATAAAACATTTTTTCCAAACT |
| | tag + his₆-tag | GGATTTCAGGACAAGAATATCTTCATCAATCTGC |
| | | AGATAACAATATAGTACTTTATAATATTGAAACA |
| | | GGACAATCATATACCATTTTGAGTAACAGAACCA |
| | | TGAAAAGTGTGAATGCTTCAAATTATGGCTTATC |
| | | ACCTGATCGGCAATTTGTATATCTAGAAAGTGAT |
| | | TATTCAAAGCTTTGGAGATACTCTTACACAGCAA |
| | | CATATTACATCTATGACCTTAGCAATGGAGAATT |
| | | TGTAAGAGGAAATGAGCTTCCTCGTCCAATTCAG |
| | | TATTTATGCTGGTCGCCTGTTGGGAGTAAATTAG |
| | | CATATGTCTATCAAAACAATATCTATTTGAAACA |
| | | AAGACCAGGAGATCCACCTTTTCAAATAACATTT |
| | | AATGGAAGAGAAAATAAAATATTTAATGGAATC |
| | | CCAGACTGGGTTTATGAAGAGGAAATGCTTGCTA |
| | | CAAAATATGCTCTCTGGTGGTCTCCTAATGGAAA |
| | | ATTTTTGGCATATGCGGAATTTAATGATACAGAT |
| | | ATACCAGTTATTGCCTATTCCTATTATGGCGATGA |
| | | ACAATATCCCAGAACAATAAATATTCCATACCCA |
| | | AAGGCCGGAGCTAAGAATCCTTTTGTTCGGATAT |
| | | TTATTATCGATACCACTTACCCTGCGTATGTAGGT |
| | | CCCCAGGAAGTGCCTGTTCCAGCAATGATAGCCT |
| | | CAAGTGATTATTATTTCAGTTGGCTCACGTGGGTT |
| | | ACTGATGAACGAGTATGTTTGCAGTGGCTAAAAA |
| | | GAGTCCAGAATGTTTCGGTCTTGTCTATATGTGAT |
| | | TTCAGGGAAGACTGGCAGACATGGGATTGTCCAA |
| | | AGACCCAGGAGCATATAGAAGAAAGCAGAACTG |
| | | GATGGGCTGGTGGATTCTTTGTTTCAACACCAGTT |
| | | TTCAGCTATGATGCCATTTCATACTACAAAATATT |
| | | TAGTGACAAGGATGGCTACAAACATATTCACTAT |
| | | ATCAAAGACACTGTGGAAAATGCTATTCAAATTA |
| | | CAAGTGGCAAGTGGGAGGCCATAAATATATTCAG |
| | | AGTAACACAGGATTCACTGTTTTATTCTAGCAAT |
| | | GAATTTGAAGATTACCCTGGAAGAAGAAACATCT |
| | | ACAGAATTAGCATTGGAAGCTATCCTCCAAGCAA |
| | | GAAGTGTGTTACTTGCCATCTAAGGAAAGAAAGG |
| | | TGCCAATATTACACAGCAAGTTTCAGCGACTACG |
| | | CCAAGTACTATGCACTTGTCTGCTATGGCCCAGG |
| | | CATCCCCATTTCCACCCTTCATGACGGACGCACT |
| | | GATCAAGAAATTAAAATCCTGGAAGAAAACAAG |
| | | GAATTGGAAAATGCTTTGAAAAATATCCAGCTGC |
| | | CTAAAGAGGAAATTAAGAAACTTGAAGTAGATG |
| | | AAATTACTTTATGGTACAAGATGATTCTTCCTCCT |
| | | CAATTTGACAGATCAAAGAAGTATCCCTTGCTAA |
| | | TTCAAGTGTATGGTGGTCCCTGCAGTCAGAGTGT |
| | | AAGGTCTGTATTTGCTGTTAATTGGATATCTTATC |
| | | TTGCAAGTAAGGAAGGGATGGTCATTGCCTTGGT |
| | | GGATGGTCGGGGAACAGCTTTCCAAGGTGACAA |
| | | ACTCCTGTATGCAGTGTATCGAAAGCTGGGTGTT |
| | | TATGAAGTTGAAGACCAGATTACAGCTGTCAGAA |
| | | AATTCATAGAAATGGGTTTCATTGATGAAAAAAG |
| | | AATAGCCATATGGGGCTGGTCCTATGGAGGATAT |
| | | GTTTCATCACTGGCCCTTGCATCTGGAACTGGTCT |
| | | TTTCAAATGTGGGATAGCAGTGGCTCCAGTCTCC |
| | | AGCTGGGAATATTACGCGTCTGTCTACACAGAGA |
| | | GATTCATGGGTCTCCCAACAAAGGATGATAATCT |
| | | TGAGCACTATAAGAATTCAACTGTGATGGCAAGA |
| | | GCAGAATATTTCAGAAATGTAGACTATCTTCTCA |
| | | TCCACGGAACAGCAGATGATAATGTGCACTTTCA |
| | | AAACTCAGCACAGATTGCTAAAGCTCTGGTTAAT |
| | | GCACAAGTGGATTTCCAGGCAATGTGGTACTCTG |
| | | ACCAGAACCACGGCTTATCCGGCCTGTCCACGAA |
| | | CCACTTATACACCCACATGACCCACTTCCTAAAG |
| | | CAGTGTTTCTCTTTGTCAGACGGCAAAAAGAAAA |
| | | AGAAAAAGGGCCACCACCATCACCATCAC |
| 61 | human CEA | UniProt no. P06731 |
| 62 | human MCSP | UniProt no. Q6UVK1 |
| 63 | human EGFR | UniProt no. P00533 |
| 64 | human CD19 | UniProt no. P15391 |
| 65 | human CD20 | Uniprot no. P11836 |
| 66 | human CD33 | UniProt no. P20138 |
| 67 | human Lymphotoxin α | UniProt no. P01374 |
| 68 | human TNF | UniProt no. P01375 |
| 69 | human Lymphotoxin β | UniProt no. Q06643 |
| 70 | human OX40L | UniProt no. P23510 |
| 71 | human CD40L | UniProt no. P29965 |
| 72 | human FasL | UniProt no. P48023 |
| 73 | human CD27L | UniProt no. P32970 |
| 74 | human CD30L | UniProt no. P32971 |
| 75 | human 4-1BBL | UniProt no. P41273 |
| 76 | human TRAIL | UniProt no. P50591 |
| 77 | human RANKL | UniProt no. O14788 |
| 78 | human TWEAK | UniProt no. O43508 |
| 79 | human APRIL | UniProt no. O75888 |
| 80 | human BAFF | UniProt no. Q9Y275 |
| 81 | human LIGHT | UniProt no. O43557 |
| 82 | human TL1A | UniProt no. O95150 |
| 83 | human GITRL | UniProt no. Q9UNG2 |
| 84 | human ectodysplasin A | UniProt no. Q92838 |
| 85 | hu 4-1BBL (50-254) | ACPWAVSGARASPGSAASPRLREGPELSPDDPAGL |
| | | LDLRQGMFAQLVAQNVLLIDGPLSWYSDPGLAGVS |
| | | LTGGLSYKEDTKELVVAKAGVYYVFFQLELRRVV |
| | | AGEGSGSVSLALHLQPLRSAAGAAALALTVDLPPA |
| | | SSEARNSAFGFQGRLLHLSAGQRLGVHLHTEARAR |
| | | HAWQLTQGATVLGLFRVTPEIPAGLPSPRSE |
| 86 | Peptide linker G4S | GGGGS |
| 87 | Peptide linker (G4S)₂ | GGGGSGGGGS |
| 88 | Peptide linker (SG4)₂ | SGGGGSGGGG |
| 89 | Peptide linker (G₄S)₃ | GGGGSGGGGSGGGGS |
| 90 | Peptide linker G4(SG4)₂ | GGGGSGGGGSGGGG |
| 91 | Peptide linker (G₄S)₄ | GGGGSGGGGSGGGGSGGGGS |
| 92 | Peptide linker | GSPGSSSSGS |
| 93 | Peptide linker | GSGSGSGS |
| 94 | Peptide linker | GSGSGNGS |
| 95 | Peptide linker | GGSGSGSG |
| 96 | Peptide linker | GGSGSG |
| 97 | Peptide linker | GGSG |
| 98 | Peptide linker | GGSGNGSG |
| 99 | Peptide linker | GGNGSGSG |
| 100 | Peptide linker | GGNGSG |
| 101 | nucleotide sequence of Fc | see Table 1 |
| | hole dimeric 4-1BBL (71- | |
| | 248) chain | |
| 102 | nucleotide sequence of anti- | see Table 1 |
| | FAP(4B9) Fc knob | |
| | monomeric 4-1BBL (71-248) | |
| 103 | nucleotide sequence of anti- | see Table 1 |
| | FAP(4B9) light chain | |
| 104 | Fc hole dimeric 4-1BB (71- | see Table 1 |
| | 248) ligand chain | |
| 105 | anti-FAP(4B9) Fc knob | see Table 1 |
| | monomeric 41-BBL (71-248) | |
| 106 | anti-FAP(4B9) light chain | see Table 1 |
| 107 | nucleotide sequence of Fc | see Table 2 |
| | hole monomeric 4-1BBL (71- | |
| | 248) chain | |
| 108 | nucleotide sequence of anti- | see Table 2 |
| | FAP(4B9) Fc knob dimeric 4- | |
| | 1BBL (71-248) | |
| 109 | Fc hole monomeric 4-1BB | see Table 2 |
| | ligand (71-248) chain | |
| 110 | anti-FAP(4B9) Fc knob | see Table 2 |
| | dimeric 4-1BBL (71-248) | |
| 111 | nucleotide sequence of anti- | see Table 3 |
| | FAP(28H1) Fc knob | |
| | monomeric 4-1BBL (71-248) | |
| 112 | nucleotide sequence of anti- | see Table 3 |
| | FAP(28H1) light chain | |
| 113 | anti-FAP(28H1) Fc knob | see Table 3 |
| | monomeric 4-1BBL (71-248) | |
| 114 | anti-FAP(28H1) light chain | see Table 3 |
| 115 | nucleotide sequence of anti- | see Table 4 |
| | FAP(28H1) Fc knob dimeric | |
| | 4-1BBL (71-248) | |
| 116 | anti-FAP(28H1) Fc knob | see Table 4 |
| | dimeric 4-1BBL (71-248) | |
| 117 | nucleotide sequence of anti- | see Table 5 |
| | CD19(8B8-018) Fc knob | |
| | monomeric 4-1BBL (71-248) | |
| 118 | nucleotide sequence of anti- | see Table 5 |
| | CD19(8B8-018) light chain | |
| 119 | anti-CD19(8B8-018) Fc knob | see Table 5 |
| | monomeric 4-1-BBL (71- | |
| | 248) | |
| 120 | anti-CD19(8B8-018) light | see Table 5 |
| | chain | |
| 121 | nucleotide sequence of anti- | see Table 6 |
| | CD19(8B8-018) Fc knob | |
| | dimeric 4-1BBL (71-248) | |
| 122 | anti-CD19(8B8-018) Fc knob | see Table 6 |
| | dimeric 4-1BB (71-248) | |
| 123 | nucleotide sequence of anti- | see Table 7 |
| | CD19(8B8-2B11) Fc knob | |
| | monomeric 4-1BBL (71-248) | |
| 124 | nucleotide sequence of anti- | see Table 7 |
| | CD19(8B8-2B11) light chain | |
| 125 | anti-CD19(8B8-2B11) Fc | see Table 7 |
| | knob monomeric 4-1BBL | |
| | (71-248) | |
| 126 | anti-CD19(8B8-2B11) light | see Table 7 |
| | chain | |
| 127 | nucleotide sequence of anti- | see Table 8 |
| | CD19(8B8-2B11) Fc knob | |
| | dimeric 4-1BBL (71-248) | |
| 128 | anti-CD19(8B8-2B11) Fc | see Table 8 |
| | knob dimeric 4-1BB ligand | |
| | (71-248) | |
| 129 | HVR-L1 of anti-CD19 8B8 | NSNGNT |
| 130 | HVR-L2 of anti-CD19 8B8 | KFNG |
| 131 | Nucleotide sequence of Fc | see Table 11 |
| | hole chain with HYRF | |
| | mutation | |
| 132 | Nucleotide sequence of | see Table 11 |
| | human CD19 antigen Fc knob | |
| | chain avi tag | |
| 133 | Fc hole chain with HYRF | see Table 11 |
| | mutation | |
| 134 | human CD19 antigen Fc knob | see Table 11 |
| | chain avi tag | |
| 135 | Nucleotide sequence of | see Table 11 |
| | cynomolgus CD19 antigen Fc | |
| | knob chain avi tag | |
| 136 | cynomolgus CD19 antigen Fc | see Table 11 |
| | knob chain avi tag | |
| 137 | Nucleotide sequence CD19 | CAAGTTCAATTGGTTCAATCTGGTGCTGAAGTAA |
| | (8B8) VH Parental clone | AAAAACCGGGCGCTTCCGTTAAAGTGAGCTGCAA |
| | | AGCATCTGGTTACACCTTCACTGACTATATCATGC |
| | | ACTGGGTTCGTCAGGCCCCGGGCCAGGGTCTGGA |
| | | GTGGATGGGCTACATTAACCCATACAACGACGGT |
| | | TCCAAATATACCGAGAAATTCCAGGGCCGCGTCA |
| | | CGATGACCAGCGACACTTCTATCTCCACCGCGTA |
| | | CATGGAACTGTCTAGACTGCGTTCTGACGACACC |
| | | GCTGTTTACTATTGTGCACGCGGTACTTACTACTA |
| | | CGGTTCCGCCCTCTTTGATTACTGGGGCCAAGGT |
| | | ACCACGGTGACCGTAAGCTCT |
| 138 | Nucleotide sequence CD19 | GATATTGTTATGACTCAAACTCCACTGTCTCTGTC |
| | (8B8) VL Parental clone | CGTGACCCCGGGTCAGCCAGCGAGCATTTCTTGC |
| | | AAATCCAGCCAATCTCTGGAAAACTCCAACGGCA |
| | | ACACGTACCTGAACTGGTATCTCCAGAAACCGGG |
| | | TCAGAGCCCGCAGCTGCTGATCTACCGTGTATCT |
| | | AAGCGCTTCTCCGGCGTTCCTGATCGTTTCAGCG |
| | | GTTCTGGATCCGGCACCGACTTTACTCTGAAAAT |
| | | CAGCCGTGTGGAAGCTGAAGACGTTGGCGTCTAC |
| | | TATTGTCTGCAGTTGACCCACGTTCCGTACACCTT |
| | | CGGTCAAGGAACTAAACTGGAAATTAAA |
| 139 | CD19 L1 reverse random | see Table 13 |
| 140 | CD19 L2 forward random | see Table 13 |
| 141 | CD19 H1 reverse random | see Table 13 |
| 142 | CD19 H2 forward random | see Table 13 |
| 143 | CD19 H3 reverse constant | see Table 13 |
| 144 | LMB3 | see Table 13 |
| 145 | CD19 L1 forward constant | see Table 14 |
| 146 | CD19 L3 reverse random | see Table 14 |
| 147 | CD19 L3 forward constant | see Table 14 |
| 148 | CD19 H3 reverse random | see Table 14 |
| 149 | Nucleotide sequence SNAP | GGCCGCCGCTAGCGGCATCGACTACAAGGACGA |
| | tag human CD19 ECD- | CGATGACAAGGCCGGCATCGATGCCATCATGGAC |
| | PDGFR | AAAGACTGCGAAATGAAGCGCACCACCCTGGAT |
| | | AGCCCTCTGGGCAAGCTGGAACTGTCTGGGTGCG |
| | | AACAGGGCCTGCACGAGATCAAGCTGCTGGGCA |
| | | AAGGAACATCTGCCGCCGACGCCGTGGAAGTGCC |
| | | TGCCCCAGCCGCCGTGCTGGGCGGACCAGAGCCA |
| | | CTGATGCAGGCCACCGCCTGGCTCAACGCCTACT |
| | | TTCACCAGCCTGAGGCCATCGAGGAGTTCCCTGT |
| | | GCCAGCCCTGCACCACCCAGTGTTCCAGCAGGAG |
| | | AGCTTTACCCGCCAGGTGCTGTGGAAACTGCTGA |
| | | AAGTGGTGAAGTTCGGAGAGGTCATCAGCTACCA |
| | | GCAGCTGGCCGCCCTGGCCGGCAATCCCGCCGCC |
| | | ACCGCCGCCGTGAAAACCGCCCTGAGCGGAAATC |
| | | CCGTGCCCATTCTGATCCCCTGCCACCGGGTGGT |
| | | GTCTAGCTCTGGCGCCGTGGGGGGCTACGAGGGC |
| | | GGGCTCGCCGTGAAAGAGTGGCTGCTGGCCCACG |
| | | AGGGCCACAGACTGGGCAAGCCTGGGCTGGGTG |
| | | ATATCCCCGAGGAACCCCTGGTCGTGAAGGTGGA |
| | | AGAGGGCGACAATGCCGTGCTGCAGTGCCTGAA |
| | | GGGCACCTCCGATGGCCCTACCCAGCAGCTGACC |
| | | TGGTCCAGAGAGAGCCCCCTGAAGCCCTTCCTGA |
| | | AGCTGTCTCTGGGCCTGCCTGGCCTGGGCATCCA |
| | | TATGAGGCCTCTGGCCATCTGGCTGTTCATCTTCA |
| | | ACGTGTCCCAGCAGATGGGCGGCTTCTACCTGTG |
| | | TCAGCCTGGCCCCCCATCTGAGAAGGCTTGGCAG |
| | | CCTGGCTGGACCGTGAACGTGGAAGGATCCGGCG |
| | | AGCTGTTCCGGTGGAACGTGTCCGATCTGGGCGG |
| | | CCTGGGATGCGGCCTGAAGAACAGATCTAGCGA |
| | | GGGCCCCAGCAGCCCCAGCGGCAAACTGATGAG |
| | | CCCCAAGCTGTACGTGTGGGCCAAGGACAGACCC |
| | | GAGATCTGGGAGGGCGAGCCTCCTTGCCTGCCCC |
| | | CTAGAGACAGCCTGAACCAGAGCCTGAGCCAGG |
| | | ACCTGACAATGGCCCCTGGCAGCACACTGTGGCT |
| | | GAGCTGTGGCGTGCCACCCGACTCTGTGTCTAGA |
| | | GGCCCTCTGAGCTGGACCCACGTGCACCCTAAGG |
| | | GCCCTAAGAGCCTGCTGAGCCTGGAACTGAAGGA |
| | | CGACAGGCCCGCCAGAGATATGTGGGTCATGGA |
| | | AACCGGCCTGCTGCTGCCTAGAGCCACAGCCCAG |
| | | GATGCCGGCAAGTACTACTGCCACAGAGGCAACC |
| | | TGACCATGAGCTTCCACCTGGAAATCACCGCCAG |
| | | ACCCGTGCTGTGGCACTGGCTGCTGAGAACAGGC |
| | | GGCTGGAAGGTCGACGAACAAAAACTCATCTCA |
| | | GAAGAGGATCTGAATGCTGTGGGCCAGGACACG |
| | | CAGGAGGTCATCGTGGTGCCACACTCCTTGCCCT |
| | | TTAAGGTGGTGGTGATCTCAGCCATCCTGGCCCT |
| | | GGTGGTGCTCACCATCATCTCCCTTATCATCCTCA |
| | | TCATGCTTTGGCAGAAGAAGCCACGT |
| 150 | Nucleotide sequence SNAP | CCGGCCGCCGCTAGCGGCATCGACTACAAGGACG |
| | tag cynomolgus CD19 ECD- | ACGATGACAAGGCCGGCATCGATGCCATCATGGA |
| | PDGFR | CAAAGACTGCGAAATGAAGCGCACCACCCTGGA |
| | | TAGCCCTCTGGGCAAGCTGGAACTGTCTGGGTGC |
| | | GAACAGGGCCTGCACGAGATCAAGCTGCTGGGC |
| | | AAAGGAACATCTGCCGCCGACGCCGTGGAAGTG |
| | | CCTGCCCCAGCCGCCGTGCTGGGCGGACCAGAGC |
| | | CACTGATGCAGGCCACCGCCTGGCTCAACGCCTA |
| | | CTTTCACCAGCCTGAGGCCATCGAGGAGTTCCCT |
| | | GTGCCAGCCCTGCACCACCCAGTGTTCCAGCAGG |
| | | AGAGCTTTACCCGCCAGGTGCTGTGGAAACTGCT |
| | | GAAAGTGGTGAAGTTCGGAGAGGTCATCAGCTAC |
| | | CAGCAGCTGGCCGCCCTGGCCGGCAATCCCGCCG |
| | | CCACCGCCGCCGTGAAAACCGCCCTGAGCGGAA |
| | | ATCCCGTGCCCATTCTGATCCCCTGCCACCGGGT |
| | | GGTGTCTAGCTCTGGCGCCGTGGGGGGCTACGAG |
| | | GGCGGGCTCGCCGTGAAAGAGTGGCTGCTGGCCC |
| | | ACGAGGGCCACAGACTGGGCAAGCCTGGGCTGG |
| | | GTGATATCCCCCAGGAACCCCTGGTCGTGAAGGT |
| | | GGAAGAGGGCGACAATGCCGTGCTCCAGTGTCTC |
| | | GAGGGCACCTCCGATGGCCCTACACAGCAGCTCG |
| | | TGTGGTGCAGAGACAGCCCCTTCGAGCCCTTCCT |
| | | GAACCTGTCTCTGGGCCTGCCTGGCATGGGCATC |
| | | AGAATGGGCCCTCTGGGCATCTGGCTGCTGATCT |
| | | TCAACGTGTCCAACCAGACCGGCGGCTTCTACCT |
| | | GTGTCAGCCTGGCCTGCCAAGCGAGAAGGCTTGG |
| | | CAGCCTGGATGGACCGTGTCCGTGGAAGGATCTG |
| | | GCGAGCTGTTCCGGTGGAACGTGTCCGATCTGGG |
| | | CGGCCTGGGATGCGGCCTGAAGAACAGAAGCAG |
| | | CGAGGGCCCTAGCAGCCCCAGCGGCAAGCTGAA |
| | | TAGCAGCCAGCTGTACGTGTGGGCCAAGGACAG |
| | | ACCCGAGATGTGGGAGGGCGAGCCTGTGTGTGGC |
| | | CCCCCTAGAGATAGCCTGAACCAGAGCCTGAGCC |
| | | AGGACCTGACAATGGCCCCTGGCAGCACACTGTG |
| | | GCTGAGCTGTGGCGTGCCACCCGACTCTGTGTCC |
| | | AGAGGCCCTCTGAGCTGGACACACGTGCGGCCTA |
| | | AGGGCCCTAAGAGCAGCCTGCTGAGCCTGGAACT |
| | | GAAGGACGACCGGCCCGACCGGGATATGTGGGT |
| | | GGTGGATACAGGCCTGCTGCTGACCAGAGCCACA |
| | | GCCCAGGATGCCGGCAAGTACTACTGCCACAGAG |
| | | GCAACTGGACCAAGAGCTTTTACCTGGAAATCAC |
| | | CGCCAGACCCGCCCTGTGGCACTGGCTGCTGAGA |
| | | ATCGGAGGCTGGAAGGTCGACGAGCAGAAGCTG |
| | | ATCTCCGAAGAGGACCTGAACGCCGTGGGCCAG |
| | | GATACCCAGGAAGTGATCGTGGTGCCCCACAGCC |
| | | TGCCCTTCAAGGTGGTCGTGATCAGCGCCATTCT |
| | | GGCCCTGGTGGTGCTGACCATCATCAGCCTGATC |
| | | ATCCTGATTATGCTGTGGCAGAAAAAGCCCCGC |
| 151 | Polypeptide sequence SNAP | PAAASGIDYKDDDDKAGIDAIMDKDCEMKRTTLDS |
| | tag human CD19 ECD- | PLGKLELSGCEQGLHEIKLLGKGTSAADAVEVPAPA |
| | PDGFR | AVLGGPEPLMQATAWLNAYFHQPEAIEEFPVPALH |
| | | HPVFQQESFTRQVLWKLLKVVKFGEVISYQQLAAL |
| | | AGNPAATAAVKTALSGNPVPILIPCHRVVSSSGAVG |
| | | GYEGGLAVKEWLLAHEGHRLGKPGLGDIPEEPLVV |
| | | KVEEGDNAVLQCLKGTSDGPTQQLTWSRESPLKPF |
| | | LKLSLGLPGLGIHMRPLAIWLFIFNVSQQMGGFYLC |
| | | QPGPPSEKAWQPGWTVNVEGSGELFRWNVSDLGG |
| | | LGCGLKNRSSEGPSSPSGKLMSPKLYVWAKDRPEI |
| | | WEGEPPCLPPRDSLNQSLSQDLTMAPGSTLWLSCG |
| | | VPPDSVSRGPLSWTHVHPKGPKSLLSLELKDDRPAR |
| | | DMWVMETGLLLPRATAQDAGKYYCHRGNLTMSF |
| | | HLEITARPVLWHWLLRTGGWKVDEQKLISEEDLNA |
| | | VGQDTQEVIVVPHSLPFKVVVISAILALVVLTIISLIIL |
| | | IMLWQKKPR |
| 152 | Polypeptide sequence SNAP | PAAASGIDYKDDDDKAGIDAIMDKDCEMKRTTLDS |
| | tag cynomolgus CD19 ECD- | PLGKLELSGCEQGLHEIKLLGKGTSAADAVEVPAPA |
| | PDGFR | AVLGGPEPLMQATAWLNAYFHQPEAIEEFPVPALH |
| | | HPVFQQESFTRQVLWKLLKVVKFGEVISYQQLAAL |
| | | AGNPAATAAVKTALSGNPVPILIPCHRVVSSSGAVG |
| | | GYEGGLAVKEWLLAHEGHRLGKPGLGDIPQEPLVV |
| | | KVEEGDNAVLQCLEGTSDGPTQQLVWCRDSPFEPF |
| | | LNLSLGLPGMGIRMGPLGIWLLIFNVSNQTGGFYLC |
| | | QPGLPSEKAWQPGWTVSVEGSGELFRWNVSDLGG |
| | | LGCGLKNRSSEGPSSPSGKLNSSQLYVWAKDRPEM |
| | | WEGEPVCGPPRDSLNQSLSQDLTMAPGSTLWLSCG |
| | | VPPDSVSRGPLSWTHVRPKGPKSSLLSLELKDDRPD |
| | | RDMWVVDTGLLLTRATAQDAGKYYCHRGNWTKS |
| | | FYLEITARPALWHWLLRIGGWKVDEQKLISEEDLN |
| | | AVGQDTQEVIVVPHSLPFKVVVISAILALVVLTIISLI |
| | | ILIMLWQKKPR |
| 153 | nucleotide sequence of anti- | see Table 17 |
| | CEA(T84.66-LCHA) Fc knob | |
| | monomeric 4-1BBL (71-248) | |
| 154 | nucleotide sequence of anti- | see Table 17 |
| | CEA(T84.66-LCHA) light | |
| | chain | |
| 155 | anti-CEA(T84.66-LCHA) Fc | see Table 17 |
| | knob monomeric 4-1 BBL | |
| | (71-248) | |
| 156 | anti-CEA(T84.66-LCHA) | see Table 17 |
| | light chain | |
| 157 | nucleotide sequence of anti- | see Table 18 |
| | CENT84.66-LCHA) Fc knob | |
| | dimeric 4-1BBL (71-248) | |
| 158 | anti-CEA(T84.66-LCHA) Fc | see Table 18 |
| | knob dimeric 4-1BBL (71- | |
| | 248) | |
| 159 | anti-mu CEA T84.66 | MKCSWVIFFL MAVVTGVNSE VQLQQSGAEL |
| | VH | VEPGASVKLS CTASGFNIKD TYMHWVKQRP |
| | | EQGLEWIGRI DPANGNSKYV PKFQGKATIT |
| | | ADTSSNTAYL QLTSLTSEDT AVYYCAPFGY |
| | | YVSDYAMAYW GQGTSVTVSS |
| 160 | anti-mu CEA T84.66 | METDTLLLWV LLLWVPGSTG DIVLTQSPAS |
| | VL | LAVSLGQRAT MSCRAGESVD IFGVGFLHWY |
| | | QQKPGQPPKL LIYRASNLES GIPVRFSGTG |
| | | SRTDFTLIID PVEADDVATY YCQQTNEDPY |
| | | TFGGGTKLEI K |
| 161 | IGHV1-69*08 | TAAGGGGCTT CCTAGTCCTA AGGCTGAGGA |
| | IMGT Acc No. Z14309 | AGGGATCCTG GTTTAGTTAA AGAGGATTTT |
| | | ATTCACCCCT GTGTCCTCTC CACAGGTGTC |
| | | CAGTCCCAGG TCCAGCTGGT GCAATCTGGG |
| | | GCTGAGGTGA AGAAGCCTGG GTCCTCGGTG |
| | | AAGGTCTCCT GCAAGGCTTC TGGAGGCACC |
| | | TTCAGCAGCT ATACTATCAG CTGGGTGCGA |
| | | CAGGCCCCTG GACAAGGGCT TGAGTGGATG |
| | | GGAAGGATCA TCCCTATCCT TGGTACAGCA |
| | | AACTACGCAC AGAAGTTCCA GGGCAGAGTC |
| | | ACGATTACCG CGGACAAATC CACGAGCACA |
| | | GCCTACATGG AGCTGAGCAG CCTGAGATCT |
| | | GAGGACACGG CCGTGTATTA CTGTGCGAGA GA |
| 162 | IGKV3-11*01 | CTGCAGCTGG AAGCTCAGCT CCCACCCAGC |
| | IMGT Acc No. | TGCTTTGCAT GTCCCTCCCA GCTGCCCTAC |
| | | CTTCCAGAGC CCATATCAAT GCCTGTGTCA |
| | | GAGCCCTGGG GAGGAACTGC TCAGTTAGGA |
| | | CCCAGAGGGA ACCATGGAAG CCCCAGCTCA |
| | | GCTTCTCTTC CTCCTGCTAC TCTGGCTCCC |
| | | AGGTGAGGGG AACATGAGGT GGTTTTGCAC |
| | | ATTAGTGAAA ACTCTTGCCA CCTCTGCTCA |
| | | GCAAGAAATA TAATTAAAAT TCAAAGTATA |
| | | TCAACAATTT TGGCTCTACT CAAAGACAGT |
| | | TGGTTTGATC TTGATTACAT GAGTGCATTT |
| | | CTGTTTTATT TCCAATTTCA GATACCACCG |
| | | GAGAAATTGT GTTGACACAG TCTCCAGCCA |
| | | CCCTGTCTTT GTCTCCAGGG GAAAGAGCCA |
| | | CCCTCTCCTG CAGGGCCAGT CAGAGTGTTA |
| | | GCAGCTACTT AGCCTGGTAC CAACAGAAAC |
| | | CTGGCCAGGC TCCCAGGCTC CTCATCTATG |
| | | ATGCATCCAA CAGGGCCACT GGCATCCCAG |
| | | CCAGGTTCAG TGGCAGTGGG TCTGGGACAG |
| | | ACTTCACTCT CACCATCAGC AGCCTAGAGC |
| | | CTGAAGATTT TGCAGTTTAT TACTGTCAGC |
| | | AGCGTAGCAA CTGGCCTCCC ACAGTGATTC |
| | | CACATGAAAC AAAAACCCCA ACAAGACCAT |
| | | CAGTGTTTAC TAGATTATTA TACCAGCTGC |
| | | TTCCTTTACA GACAGCTAGT GGGGTGGCCA |
| | | CTCAGTGTTA GCATCTCAGC TCTATTTGGC |
| | | CATTTTGGAG TTCAAGT |
| 163 | Parental CEA binder VH | see Table 20 |
| 164 | Parental CEA binder VL | see Table 20 |
| 165 | nucleotide sequence of DP47 | see Table 21 |
| | Fc knob monomeric 4-1BBL | |
| | (71-248) | |
| 166 | nucleotide sequence of DP47 | see Table 21 |
| | light chain | |
| 167 | DP47 Fc knob monomeric 4- | see Table 21 |
| | 1BBL (71-248) | |
| 168 | DP47 light chain | see Table 21 |
| 169 | nucleotide sequence of DP47 | see Table 22 |
| | Fc knob dimeric 4-1BBL (71- | |
| | 248) | |
| 170 | DP47 Fc knob dimeric 4- | see Table 22 |
| | 1BBL (71-248) | |
| 171 | nucleotide sequence of anti- | see Table 23 |
| | FAP(4B9) Fc hole dimeric 4- | |
| | 1BB ligand (71-248) | |
| 172 | nucleotide sequence of Fc | see Table 23 |
| | knob monomeric 4-1BBL | |
| | (71-248) | |
| 173 | anti-FAP(4B9) Fc hole | see Table 23 |
| | dimeric 4-1BB ligand (71- | |
| | 248) | |
| 174 | Fc knob monomeric 4-1BBL | see Table 23 |
| | (71-248) | |
| 175 | nucleotide sequence of anti- | see Table 24 |
| | FAP(4B9) Fc hole | |
| | monomeric 4-1BBL (71-248) | |
| 176 | nucleotide sequence of Fc | see Table 24 |
| | knob dimeric 4-1BB ligand | |
| | (71-248) | |
| 177 | anti-FAP(4B9) Fc hole | see Table 24 |
| | monomeric 4-1BBL (71-248) | |
| 178 | Fc knob dimeric 4-1BB | see Table 24 |
| | ligand (71-248) | |
| 179 | nucleotide sequence of anti- | see Table 25 |
| | FAP(28H1) Fc hole dimeric | |
| | 4-1BB ligand (71-248) | |
| 180 | anti-FAP(28H1) Fc hole | see Table 25 |
| | dimeric 4-1BB ligand (71- | |
| | 248) | |
| 181 | nucleotide sequence of anti- | see Table 26 |
| | FAP(28H1) Fc hole | |
| | monomeric 4-1BBL (71-248) | |
| 182 | anti-FAP(28H1) Fc hole | see Table 26 |
| | monomeric 4-1BBL (71-248) | |
| 183 | nucleotide sequence of anti- | see Table 27 |
| | CD19(8B8-018) Fc hole | |
| | dimeric 4-1BB ligand (71- | |
| | 248) chain | |
| 184 | anti-CD19(8B8-018) Fc hole | see Table 27 |
| | dimeric 4-1BB (71-248) | |
| | ligand chain | |
| 185 | nucleotide sequence of anti- | see Table 28 |
| | CD19(8B8-018) Fc hole | |
| | monomeric 4-1BBL (71-248) | |
| | chain | |
| 186 | anti-CD19(8B8-018) Fc hole | see Table 28 |
| | monomeric 4-1BBL (71-248) | |
| | chain | |
| 187 | nucleotide sequence of anti- | see Table 29 |
| | CD19(8B8-2B11) Fc hole | |
| | dimeric 4-1BB ligand (71- | |
| | 248) chain | |
| 188 | anti-CD19(8B8-2B11) Fc | see Table 29 |
| | hole dimeric 4-1BB ligand | |
| | (71-248) chain | |
| 189 | nucleotide sequence of anti- | see Table 30 |
| | CD19(8B8-2B11) Fc hole | |
| | monomeric 4-1BB ligand | |
| | (71-248) chain | |
| 190 | anti-CD19(8B8-2B11) Fc | see Table 30 |
| | hole monomeric 4-1BB | |
| | ligand (71-248) chain | |
| 191 | nucleotide sequence of anti- | see Table 31 |
| | CEA(T84.66-LCHA) Fc hole | |
| | dimeric 4-1BB ligand (71- | |
| | 248) chain | |
| 192 | anti-CEA(T84.66-LCHA) Fc | see Table 31 |
| | hole dimeric 4-1BB ligand | |
| | (71-248) chain | |
| 193 | nucleotide sequence of anti- | see Table 32 |
| | CEA(T84.66-LCHA) Fc hole | |
| | monomeric 4-1BBL (71-248) | |
| | chain | |
| 194 | anti-CEA(T84.66-LCHA) Fc | see Table 32 |
| | hole monomeric 4-1BBL (71- | |
| | 248) chain | |
| 195 | nucleotide sequence of DP47 | see Table 33 |
| | Fc hole dimeric 4-1BB ligand | |
| | (71-248) chain | |
| 196 | DP47 Fc hole dimeric 4-1BB | see Table 33 |
| | ligand (71-248) chain | |
| 197 | nucleotide sequence of DP47 | see Table 34 |
| | Fc hole monomeric 4-1BBL | |
| | (71-248) chain | |
| 198 | DP47 Fc hole monomeric 4- | see Table 34 |
| | 1BBL (71-248) chain | |
| 199 | nucleotide sequence of | see Table 35 |
| | dimeric 4-1BB ligand (71- | |
| | 248)-CL* Fc knob chain | |
| 200 | nucleotide sequence of | see Table 35 |
| | monomeric 4-1BBL (71-248)- | |
| | CH1* | |
| 201 | nucleotide sequence of DP47 | see Table 35 |
| | Fc hole chain | |
| 202 | dimeric 4-1BB ligand (71- | see Table 35 |
| | 248)-CL* Fc knob chain | |
| 203 | monomeric 4-1BBL (71-248)- | see Table 35 |
| | CH1* | |
| 204 | DP47 Fc hole chain | see Table 35 |
| 205 | nucleotide sequence of DP47 | see Table 38 |
| | heavy chain (huIgG1 | |
| | PGLALA) | |
| 206 | DP47 heavy chain (huIgG1 | see Table 38 |
| | PGLALA) | |
| 207 | nucleotide sequence of | see Table 40 |
| | human 4-1BB His | |
| 208 | human 4-1BB His | see Table 40 |
| 209 | nucleotide sequence of | see Table 44 |
| | FAP(4B9) Fc hole dimeric 4- | |
| | 1BB ligand (71-254) chain | |
| 210 | nucleotide sequence of DP47 | see Table 44 |
| | Fc knob monomeric 4-1BB | |
| | (71-254) ligand | |
| 211 | nucleotide sequence of DP47 | see Table 44 |
| | (VL-CH1) light chain | |
| 212 | anti-FAP(4B9) Fc hole | see Table 44 |
| | dimeric 4-1BB ligand (71- | |
| | 254) chain | |
| 213 | DP47 Fc knob monomeric 4- | see Table 44 |
| | 1BB (71-254) ligand | |
| 214 | DP47 (VL-CH1) light chain | see Table 44 |
| 215 | nucleotide sequence of anti- | see Table 45 |
| | FAP(4B9) Fc hole | |
| | monomeric 4-1BBL (71-254) | |
| | chain | |
| 216 | nucleotide sequence of DP47 | see Table 45 |
| | (VH-CL) Fc knob dimeric 4- | |
| | 1BB ligand (71-254) chain | |
| 217 | anti-FAP(4B9) Fc hole | see Table 45 |
| | monomeric 4-1BBL (71-254) | |
| | chain | |
| 218 | DP47 (VH-CL) Fc knob | see Table 45 |
| | dimeric 4-1BB ligand (71- | |
| | 254) chain | |
| 219 | nucleotide sequence of | see Table 45 |
| | DP47(VH-CL) Fc hole | |
| | dimeric 4-1BB ligand (71- | |
| | 254) chain | |
| 220 | nucleotide sequence of FAP | see Table 46 |
| | (4B9) Fc knob monomeric 4- | |
| | 1BB (71-254) ligand | |
| 221 | DP47(VH-CL) Fc hole | see Table 46 |
| | dimeric 4-1BB ligand (71- | |
| | 254) chain | |
| 222 | FAP (4B9) Fc knob | see Table 46 |
| | monomeric 4-1BB (71-254) | |
| | ligand | |
| 223 | nucleotide sequence of DP47 | see Table 47 |
| | (VH-CL) Fc hole monomeric | |
| | 4-1BBL (71-254) chain | |
| 224 | nucleotide sequence of FAP | see Table 47 |
| | (4B9) Fc knob dimeric 4-1BB | |
| | ligand (71-254) chain | |
| 225 | DP47 (VH-CL) Fc hole | see Table 47 |
| | monomeric 4-1BBL (71-254) | |
| | chain | |
| 226 | FAP (4B9) Fc knob dimeric | see Table 47 |
| | 4-1BB ligand (71-254) chain | |
| 227 | nucleotide sequence of DP47 | see Table 48 |
| | (VHCL) Fc knob monomeric | |
| | 4-1BB (71-248) ligand | |
| 228 | DP47 (VH-CL) Fc knob | see Table 48 |
| | monomeric 4-1BB (71-248) | |
| | ligand | |
| 229 | nucleotide sequence of DP47 | see Table 49 |
| | (VH-CL) Fc knob dimeric 4- | |
| | 1BB ligand (71-248) chain | |
| 230 | DP47 (VH-CL) Fc knob | see Table 49 |
| | dimeric 4-1BB ligand (71- | |
| | 248) chain | |
| 231 | nucleotide sequence of | see Table 50 |
| | DP47(VH-CL) Fc hole | |
| | dimeric 4-1BB ligand (71- | |
| | 248) chain | |
| 232 | DP47(VH-CL) Fc hole | see Table 50 |
| | dimeric 4-1BB ligand (71- | |
| | 248) chain | |
| 233 | nucleotide sequence of DP47 | see Table 51 |
| | (VH-CL) Fc hole monomeric | |
| | 4-1BBL (71-248) chain | |
| 234 | DP47 (VH-CL) Fc hole | see Table 51 |
| | monomeric 4-1BBL (71-248) | |
| | chain | |
| 235 | nucleotide sequence of anti- | see Table 36 |
| | FAP (4B9) Fc hole chain | |
| 236 | anti-FAP (4B9) Fc hole chain | see Table 36 |
| 237 | Nucleotide sequence of anti- | see Table 37a |
| | CD19(8B8-018) Fc hole | |
| | chain | |
| 238 | anti-CD19(8B8-018) Fc hole | see Table 37a |
| | chain | |
| 239 | nucleotide sequence of | see Table 37b |
| | dimeric hu 4-1BBL (71-254)- | |
| | CL* Fc knob chain | |
| 240 | nucleotide sequence of | see Table 37b |
| | monomeric hu 4-1BBL (71- | |
| | 254)-CH1* | |
| 241 | nucleotide sequence of anti- | see Table 37b |
| | CD19(8B8-2B11) Fc hole | |
| | chain | |
| 242 | Dimeric hu 4-1BBL (71-254)- | see Table 37b |
| | CL* Fc knob chain | |
| 243 | Monomeric hu 4-1BBL (71- | see Table 37b |
| | 254)-CH1* | |
| 244 | CD19(8B8-2B11) Fc hole | see Table 37b |
| | chain | |
| 245 | avi tag | GLNDIFEAQKIEWHE |

[0590] General information regarding the nucleotide sequences of human immunoglobulins light and heavy chains is given in: Kabat, E. A., et al., Sequences of Proteins of Immunological Interest, 5th ed., Public Health Service, National Institutes of Health, Bethesda, Md. (1991). Amino acids of antibody chains are numbered and referred to according to the EU numbering systems according to Kabat (Kabat, E. A., et al., Sequences of Proteins of Immunological Interest, 5th ed., Public Health Service, National Institutes of Health, Bethesda, Md. (1991)) as defined above.

The following numbered paragraphs (paras) describe aspects of the present invention:
[0591] 1. A TNF family ligand trimer-containing antigen binding molecule comprising
   [0592] (a) a Fab domain capable of specific binding to a target cell antigen,
   [0593] (b) a Fc domain composed of a first and a second subunit capable of stable association, and
   [0594] (c) a first polypeptide comprising two ectodomains of a TNF ligand family member or fragments thereof that are connected to each other by a peptide linker and a second polypeptide comprising one ectodomain of said TNF ligand family member or a fragment thereof, wherein the first polypeptide is fused at its N-terminus to the C-terminus to one of the subunits of the Fc domain and wherein the second polypeptide is fused at its N-terminus to the C-terminus of the other subunit of the Fc domain.
[0595] 2. The TNF family ligand trimer-containing antigen binding molecule of para 1, wherein the TNF ligand family member costimulates human T-cell activation.
[0596] 3. The TNF family ligand trimer-containing antigen binding molecule of paras 1 or 2, wherein the TNF ligand family member is selected from 4-1BBL and OX40L.
[0597] 4. The TNF family ligand trimer-containing antigen binding molecule of any one of paras 1 to 3, wherein the TNF ligand family member is 4-1BBL.
[0598] 5. The TNF family ligand trimer-containing antigen binding molecule of any one of paras 1 to 4, wherein the ectodomain of a TNF ligand family member comprises the amino acid sequence selected from the group consisting of SEQ ID NO:1, SEQ ID NO: 2, SEQ ID NO:3, SEQ ID NO:4, SEQ ID NO:5, SEQ ID NO:6, SEQ ID NO:7 and SEQ ID NO:8, particularly the amino acid sequence of SEQ ID NO:1 or SEQ ID NO:5.
[0599] 6. The TNF family ligand trimer-containing antigen binding molecule of any one of paras 1 to 5, wherein the first polypeptide comprising two ectodomains of a TNF ligand family member or fragments thereof comprises an amino acid sequence selected from the group consisting of SEQ ID NO:9 and SEQ ID NO:10 and the second polypeptide comprising one ectodomain of said TNF ligand family member or a fragment thereof comprises the amino acid sequence selected from the group consisting of SEQ ID NO:1 and SEQ ID NO:5.
[0600] 7. The TNF family ligand trimer-containing antigen binding molecule of any one of paras 1 to 3, wherein the TNF ligand family member is OX40L.
[0601] 8. The TNF family ligand trimer-containing antigen binding molecule of any one of paras 1 to 3 or 7, wherein the ectodomain of a TNF ligand family member comprises the amino acid sequence selected from the group consisting of SEQ ID NO:11 and SEQ ID NO:12.
[0602] 9. The TNF family ligand trimer-containing antigen binding molecule of any one of paras 1 to 8, wherein TNF family ligand trimer-containing antigen binding molecule is monovalent for the binding to the target cell antigen.
[0603] 10. The TNF family ligand trimer-containing antigen binding molecule of any one of paras 1 to 9, wherein the target cell antigen is selected from the group consisting of Fibroblast Activation Protein (FAP), Melanoma-associated Chondroitin Sulfate Proteoglycan (MCSP), Epidermal Growth Factor Receptor (EGFR), Carcinoembryonic Antigen (CEA), CD19, CD20 and CD33.
[0604] 11. The TNF family ligand trimer-containing antigen binding molecule of any one of paras 1 to 10, wherein the target cell antigen is Fibroblast Activation Protein (FAP).
[0605] 12. The TNF family ligand trimer-containing antigen binding molecule of any one of paras 1 to 11, wherein the Fab domain capable of specific binding to FAP comprises
   [0606] (a) a VH domain comprising (i) CDR-H1 comprising the amino acid sequence of SEQ ID NO:13, (ii) CDR-H2 comprising the amino acid sequence of SEQ ID NO:14 and (iii) CDR-H3 comprising the amino acid sequence of SEQ ID NO:15, and a VL domain comprising (iv) CDR-L1 comprising the amino acid sequence of SEQ ID NO:16, (v) CDR-L2 comprising the amino acid sequence of SEQ ID NO:17 and (vi) CDR-L3 comprising the amino acid sequence of SEQ ID NO:18 or
   [0607] (b) a VH domain comprising (i) CDR-H1 comprising the amino acid sequence of SEQ ID NO:19, (ii) CDR-H2 comprising the amino acid sequence of SEQ ID NO:20 and (iii) CDR-H3 comprising the amino acid sequence of SEQ ID NO:21, and a VL domain comprising (iv) CDR-L1 comprising the amino acid sequence of SEQ ID NO:22, (v) CDR-L2 comprising the amino acid sequence of SEQ ID NO:23 and (vi) CDR-L3 comprising the amino acid sequence of SEQ ID NO:24.
[0608] 13. The TNF family ligand trimer-containing antigen binding molecule of any one of paras 1 to 12, wherein the Fab domain capable of specific binding to FAP comprises a variable heavy chain comprising an amino acid sequence of SEQ ID NO:25 and a variable light chain comprising an amino acid sequence of SEQ ID NO:26 or wherein the Fab domain capable of specific binding to FAP comprises a variable heavy chain comprising an amino acid sequence of SEQ ID NO:27 and a variable light chain comprising an amino acid sequence of SEQ ID NO:28.
[0609] 14. The TNF family ligand trimer-containing antigen binding molecule of any one of paras 1 to 10, wherein the target cell antigen is CD19.
[0610] 15. The TNF family ligand trimer-containing antigen binding molecule of any one of paras 1 to 10 or 14, wherein Fab domain capable of specific binding to CD19 comprises
   [0611] (a) a VH domain comprising (i) CDR-H1 comprising the amino acid sequence of SEQ ID NO:29, (ii) CDR-H2 comprising the amino acid sequence of SEQ ID NO:30 and (iii) CDR-H3 comprising the amino acid sequence of SEQ ID NO:31, and a VL domain comprising (iv) CDR-L1 comprising the amino acid sequence of SEQ ID NO:32, (v) CDR-L2 comprising the amino acid sequence of SEQ ID NO:33 and (vi) CDR-L3 comprising the amino acid sequence of SEQ ID NO:34 or
   [0612] (b) a VH domain comprising (i) CDR-H1 comprising the amino acid sequence of SEQ ID NO:35, (ii) CDR-H2 comprising the amino acid sequence of SEQ ID NO:36 and (iii) CDR-H3 comprising the amino acid sequence of SEQ ID NO:37, and a VL domain comprising (iv) CDR-L1 comprising the amino acid sequence of SEQ ID NO:38, (v) CDR-L2 comprising the amino acid sequence of SEQ ID NO:39 and (vi) CDR-L3 comprising the amino acid sequence of SEQ ID NO:40.
[0613] 16. The TNF family ligand trimer-containing antigen binding molecule of any one of paras 1 to 10, 14 or 15, wherein the Fab domain capable of specific binding to CD19 comprises a variable heavy chain comprising an amino acid sequence of SEQ ID NO:41 and a variable light chain comprising an amino acid sequence of SEQ ID NO:42 or wherein the Fab domain capable of specific binding to FAP comprises a variable heavy chain comprising an amino acid sequence of SEQ ID NO:43 and a variable light chain comprising an amino acid sequence of SEQ ID NO:44.
[0614] 17. The TNF family ligand trimer-containing antigen binding molecule of any one of paras 1 to 10, wherein the target cell antigen is CEA.
[0615] 18. The TNF family ligand trimer-containing antigen binding molecule of any one of paras 1 to 10 or 17, wherein Fab domain capable of specific binding to CEA comprises a VH domain comprising (i) CDR-H1 comprising the amino acid sequence of SEQ ID NO:45, (ii) CDR-H2 comprising the amino acid sequence of SEQ ID NO:46 and (iii) CDR-H3 comprising the amino acid sequence of SEQ ID NO:47, and a VL domain comprising (iv) CDR-L1 comprising the amino acid sequence of SEQ ID NO:48, (v) CDR-L2 comprising the amino acid sequence of SEQ ID NO:49 and (vi) CDR-L3 comprising the amino acid sequence of SEQ ID NO:50.
[0616] 19. The TNF family ligand trimer-containing antigen binding molecule of any one of paras 1 to 10, 17 or 18, wherein the Fab domain capable of specific binding to CEA comprises a variable heavy chain comprising an amino acid sequence of SEQ ID NO:51 and a variable light chain comprising an amino acid sequence of SEQ ID NO:52.
[0617] 20. The TNF family ligand trimer-containing antigen binding molecule of any one of paras 1 to 19, wherein the Fc domain is an IgG, particularly an IgG1 Fc domain or an IgG4 Fc domain.
[0618] 21. The TNF family ligand trimer-containing antigen binding molecule of any one of paras 1 to 20, wherein the Fc domain is an IgG1 Fc domain comprising the amino acid substitutions at positions 234 and 235 (EU numbering) and/or 329 (EU numbering).
[0619] 22. The TNF family ligand trimer-containing antigen binding molecule of any one of paras 1 to 21, wherein the first subunit of the Fc domain comprises the amino acid substitutions S354C and T366W (numbering according to Kabat EU index) and the second subunit of the Fc domain comprises the amino acid substitutions Y349C, T366S, L368A and Y407V (numbering according to Kabat EU index).
[0620] 23. The TNF family ligand trimer-containing antigen binding molecule of any one of paras 1 to 22, wherein the first polypeptide comprising two ectodomains of a TNF ligand family member or fragments thereof that are connected to each other by a peptide linker is fused at its N-terminus to the C-terminus of the second subunit of the Fc domain and the second polypeptide comprising one ectodomain of said TNF ligand family member or a fragment thereof is fused at its N-terminus to the C-terminus of the first subunit of the Fc domain.
[0621] 24. The TNF family ligand trimer-containing antigen binding molecule of any one of paras 1 to 22, wherein the first polypeptide comprising two ectodomains of a TNF ligand family member or fragments thereof that are connected to each other by a peptide linker is fused at its N-terminus to the C-terminus of the first subunit of the Fc domain and the second polypeptide comprising one ectodomain of said TNF ligand family member or a fragment thereof is fused at its N-terminus to the C-terminus of the second subunit of the Fc domain.
[0622] 25. The TNF family ligand trimer-containing antigen binding molecule of any one of paras 1 to 24, wherein Fab domain capable of specific binding to a target cell antigen is fused at the C-terminus to the N-terminus of the first subunit of the Fc domain.
[0623] 26. The TNF family ligand trimer-containing antigen binding molecule of any one of paras 1 to 26 further comprising
   [0624] (d) a Fab domain that is not capable of specific binding to a target cell antigen.
[0625] 27. An isolated polynucleotide encoding the TNF family ligand trimer-containing antigen binding molecule of any one of paras 1 to 16.
[0626] 28. A vector, particularly an expression vector, comprising the isolated polynucleotide of para 27.
[0627] 29. A host cell comprising the isolated polynucleotide of para 27 or the vector of para 28.
[0628] 30. A method for producing the TNF family ligand trimer-containing antigen binding molecule of any one of paras 1 to 26, comprising the steps of
   [0629] (i) culturing the host cell of para 29 under conditions suitable for expression of the antigen binding molecule, and
   [0630] (ii) recovering the antigen binding molecule.
[0631] 31. A pharmaceutical composition comprising the TNF family ligand trimer-containing antigen binding molecule of any one of paras 1 to 26 and at least one pharmaceutically acceptable excipient.
[0632] 32. The TNF family ligand trimer-containing antigen binding molecule of any one of paras 1 to 26, or the pharmaceutical composition of para 31, for use as a medicament.
[0633] 33. The TNF family ligand trimer-containing antigen binding molecule of any one of paras 1 to 26, or the pharmaceutical composition of para 31, for use in the treatment of cancer.
[0634] 34. Use of the TNF family ligand trimer-containing antigen binding molecule of any one of paras 1 to 26 for the manufacture of a medicament for the treatment of cancer.
[0635] 35. A method of treating a disease in an individual, comprising administering to said individual a therapeutically effective amount of a composition comprising a TNF family ligand trimer-containing antigen binding molecule of any one of paras 1 to 26 in a pharmaceutically acceptable form.
[0636] 36. The method of para 35, wherein said disease is cancer.

### EXAMPLES

[0637] The following are examples of methods and compositions of the invention. It is understood that various other embodiments may be practiced, given the general description provided above.

[0638] Recombinant DNA techniques

[0639] Standard methods were used to manipulate DNA as described in Sambrook et al., Molecular cloning: A laboratory manual; Cold Spring Harbor Laboratory Press, Cold Spring Harbor, New York, 1989. The molecular biological reagents were used according to the manufacturer's instructions. General information regarding the nucleotide sequences of human immunoglobulin light and heavy chains is given in: Kabat, E. A. et al., (1991) Sequences of Proteins of Immunological Interest, Fifth Ed., NIH Publication No 91-3242.

[0640] DNA Sequencing

[0641] DNA sequences were determined by double strand sequencing.

[0642] Gene Synthesis

[0643] Desired gene segments were either generated by PCR using appropriate templates or were synthesized by Geneart AG (Regensburg, Germany) from synthetic oligonucleotides and PCR products by automated gene synthesis. In cases where no exact gene sequence was available, oligonucleotide primers were designed based on sequences from closest homologues and the genes were isolated by RT-PCR from RNA originating from the appropriate tissue. The gene segments flanked by singular restriction endonuclease cleavage sites were cloned into standard cloning/sequencing vectors. The plasmid DNA was purified from transformed bacteria and concentration determined by UV spectroscopy. The DNA sequence of the subcloned gene fragments was confirmed by DNA sequencing. Gene segments were designed with suitable restriction sites to allow sub-cloning into the respective expression vectors. All constructs were designed with a 5′-end DNA sequence coding for a leader peptide which targets proteins for secretion in eukaryotic cells.

[0644] Cell Culture Techniques

[0645] Standard cell culture techniques were used as described in Current Protocols in Cell Biology (2000), Bonifacino, J. S., Dasso, M., Harford, J. B., Lippincott-Schwartz, J. and Yamada, K. M. (eds.), John Wiley & Sons, Inc.

[0646] Protein Purification

[0647] Proteins were purified from filtered cell culture supernatants referring to standard protocols. In brief, antibodies were applied to a Protein A Sepharose column (GE healthcare) and washed with PBS. Elution of antibodies was achieved at pH 2.8 followed by immediate neutralization of the sample. Aggregated protein was separated from monomeric antibodies by size exclusion chromatography (Superdex 200, GE Healthcare) in PBS or in 20 mM Histidine, 150 mM NaCl pH 6.0. Monomeric antibody fractions were pooled, concentrated (if required) using e.g., a MILLIPORE Amicon Ultra (30 MWCO) centrifugal concentrator, frozen and stored at −20° C. or −80° C. Part of the samples were provided for subsequent protein analytics and analytical characterization e.g. by SDS-PAGE, size exclusion chromatography (SEC) or mass spectrometry.

[0648] SDS-PAGE

[0649] The NuPAGE® Pre-Cast gel system (Invitrogen) was used according to the manufacturer's instruction. In particular, 10% or 4-12% NuPAGE® Novex® Bis-TRIS Pre-Cast gels (pH 6.4) and a NuPAGE® MES (reduced gels, with NuPAGE® Antioxidant running buffer additive) or MOPS (non-reduced gels) running buffer was used.

[0650] Analytical Size Exclusion Chromatography

[0651] Size exclusion chromatography (SEC) for the determination of the aggregation and oligomeric state of antibodies was performed by HPLC chromatography. Briefly, Protein A purified antibodies were applied to a Tosoh TSKgel G3000SW column in 300 mM NaCl, 50 mM KH₂PO₄/K₂HPO₄, pH 7.5 on an Agilent HPLC 1100 system or to a Superdex 200 column (GE Healthcare) in 2× PBS on a Dionex HPLC-System. The eluted protein was quantified by UV absorbance and integration of peak areas. BioRad Gel Filtration Standard 151-1901 served as a standard.

[0652] Mass Spectrometry

[0653] This section describes the characterization of the multispecific antibodies with VH/VL exchange (VH/VL CrossMabs) with emphasis on their correct assembly. The expected primary structures were analyzed by electrospray ionization mass spectrometry (ESI-MS) of the deglycosylated intact CrossMabs and deglycosylated/plasmin digested or alternatively deglycosylated/limited LysC digested CrossMabs.

[0654] The VH/VL CrossMabs were deglycosylated with N-Glycosidase F in a phosphate or Tris buffer at 37° C. for up to 17 h at a protein concentration of 1 mg/ml. The plasmin or limited LysC (Roche) digestions were performed with 100 μg deglycosylated VH/VL CrossMabs in a Tris buffer pH 8 at room temperature for 120 hours and at 37° C. for 40 min, respectively. Prior to mass spectrometry the samples were desalted via HPLC on a Sephadex G25 column (GE Healthcare). The total mass was determined via ESI-MS on a maXis 4G UHR-QTOF MS system (Bruker Daltonik) equipped with a TriVersa NanoMate source (Advion).

[0655] Determination of Binding and Binding Affinity of Multispecific Antibodies to the Respective Antigens using surface Plasmon Resonance (SPR) (BIACORE)

[0656] Binding of the generated antibodies to the respective antigens is investigated by surface plasmon resonance using a BIACORE instrument (GE Healthcare Biosciences AB, Uppsala, Sweden). Briefly, for affinity measurements Goat-Anti-Human IgG, MR 109-005-098 antibodies are immobilized on a CMS chip via amine coupling for presentation of the antibodies against the respective antigen. Binding is measured in HBS buffer (HBS-P (10 mM HEPES, 150 mM NaCl, 0.005% Tween 20, ph 7.4), 25° C. (or alternatively at 37° C.). Antigen (R&D Systems or in house purified) was added in various concentrations in solution. Association was measured by an antigen injection of 80 seconds to 3 minutes; dissociation was measured by washing the chip surface with HBS buffer for 3-10 minutes and a KD value was estimated using a 1:1 Langmuir binding model. Negative control data (e.g. buffer curves) are subtracted from sample curves for correction of system intrinsic baseline drift and for noise signal reduction. The respective Biacore Evaluation Software is used for analysis of sensorgrams and for calculation of affinity data.

### Example 1

### Preparation of Monovalent Targeted Human 4-1BB Ligand Trimer-containing Fc Fusion Antigen Binding Molecules

[0657] 1.1 Preparation of Monovalent FAP-Targeted 4-1BB Ligand Trimer-Containing Fc (kih) Fusion Antigen Binding Molecule, wherein the 4-1BB Ligands are C-Terminally Fused (Constructs 1.11, 2.11, 1.12 and 2.12) (FAP on the Knob Chain)

[0658] The DNA sequence encoding part of the ectodomain (amino acid 71-248) of human 4-1BB ligand was synthetized according to the P41273 sequence of Uniprot database (SEQ ID NO:75).

[0659] A polypeptide containing two ectodomains of 4-1BB ligand, separated by (G45)2 linkers was subcloned in frame to the C-terminus of human IgG1 Fc hole or knob chain (Merchant, Zhu 1998), as depicted in FIG. 1a: human IgG1 Fc, (G45)2 connector, human 4-1BB ligand, (G45)2 connector, human 4-1BB ligand. A polypeptide containing one ectodomain of 4-1BB ligand was subcloned in frame to the C-terminus of human IgG1 Fc knob or hole chain as described in FIG. 1b: human IgG1 Fc, (G45)2 connector, human 4-1BB ligand.

[0660] The variable region of heavy and light chain DNA sequences encoding a binder specific for fibroblast activation protein (FAP), clone 4B9 or clone 28H1, were subcloned in frame with either the constant heavy chain of the knob or the constant light chain of human IgG1. The generation and preparation of the FAP binders is described in WO 2012/020006 A2, which is incorporated herein by reference.

[0661] The Pro329Gly, Leu234Ala and Leu235Ala mutations have been introduced in the constant region of the knob and hole heavy chains to abrogate binding to Fc gamma receptors according to the method described in International Patent Appl. Publ. No. WO 2012/130831 A1.

[0662] For all constructs the knobs into holes heterodimerization technology was used as described in Carter, J Immunol Methods 248, 7-15 (2001). Combination of the hulgG1 Fc hole chain containing the Y349C/T366S/L368A/Y407V mutations in the CH3 domain, the anti-FAP hulgG1 knob chain containing the S354C/T366W mutations in the CH3 domain and the anti-FAP light chain allows generation of a heterodimer, which includes an assembled trimeric 4-1BB ligand and one FAP binding Fab (FIGS. 2A and 2B).

[0663] Table 1 shows the cDNA and amino acid sequences of the monovalent FAP(4B9)-targeted 4-1BB ligand (71-248) trimer-containing Fc (kih) fusion antigen binding molecule (Construct 2.11).

TABLE 1
Sequences of FAP(4B9)-targeted human 4-1BB ligand
trimer containing Fc (kih) fusion molecule Construct 2.11

| SEQ ID | | |
|---|---|---|
| NO: | Description | Sequence |
| 101 | nucleotide | GACAAAACTCACACATGCCCACCGTGCCCAGCACCTGA |
| | sequence of Fc | AGCTGCAGGGGGACCGTCAGTCTTCCTCTTCCCCCCAAA |
| | hole dimeric 4- | ACCCAAGGACACCCTCATGATCTCCCGGACCCCTGAGGT |
| | 1BB ligand (71- | CACATGCGTGGTGGTGGACGTGAGCCACGAAGACCCTG |
| | 248) chain | AGGTCAAGTTCAACTGGTACGTGGACGGCGTGGAGGTG |
| | | CATAATGCCAAGACAAAGCCGCGGGAGGAGCAGTACAA |
| | | CAGCACGTACCGTGTGGTCAGCGTCCTCACCGTCCTGCA |
| | | CCAGGACTGGCTGAATGGCAAGGAGTACAAGTGCAAGG |
| | | TCTCCAACAAAGCCCTCGGCGCCCCCATCGAGAAAACC |
| | | ATCTCCAAAGCCAAAGGGCAGCCCCGAGAACCACAGGT |
| | | GTGCACCCTGCCCCCATCCCGGGATGAGCTGACCAAGA |
| | | ACCAGGTCAGCCTCTCGTGCGCAGTCAAAGGCTTCTATC |
| | | CCAGCGACATCGCCGTGGAGTGGGAGAGCAATGGGCAG |
| | | CCGGAGAACAACTACAAGACCACGCCTCCCGTGCTGGA |
| | | CTCCGACGGCTCCTTCTTCCTCGTGAGCAAGCTCACCGT |
| | | GGACAAGAGCAGGTGGCAGCAGGGGAACGTCTTCTCAT |
| | | GCTCCGTGATGCATGAGGCTCTGCACAACCACTACACGC |
| | | AGAAGAGCCTCTCCCTGTCTCCGGGTGGAGGCGGCGGA |
| | | AGCGGAGGAGGAGGATCCAGAGAGGGCCCTGAGCTGAG |
| | | CCCTGATGATCCTGCCGGACTGCTGGACCTGCGGCAGGG |
| | | AATGTTTGCCCAGCTGGTGGCCCAGAACGTGCTGCTGAT |
| | | CGATGGCCCCCTGTCCTGGTACAGCGATCCTGGACTGGC |
| | | TGGCGTGTCACTGACAGGCGGCCTGAGCTACAAAGAGG |
| | | ACACCAAAGAACTGGTGGTGGCCAAGGCCGGCGTGTAC |
| | | TACGTGTTCTTTCAGCTGGAACTGCGGAGAGTGGTGGCC |
| | | GGCGAAGGATCTGGCTCTGTGTCTCTGGCCCTGCATCTG |
| | | CAGCCTCTGAGATCTGCTGCTGGCGCCGCTGCTCTGGCA |
| | | CTGACAGTGGATCTGCCTCCTGCCAGCAGCGAGGCCCG |
| | | GAATAGCGCATTTGGGTTTCAAGGCAGGCTGCTGCACCT |
| | | GTCTGCCGGCCAGAGGCTGGGAGTGCATCTGCACACAG |
| | | AGGCCAGGGCTAGACACGCCTGGCAGCTGACACAGGGC |
| | | GCTACAGTGCTGGGCCTGTTCAGAGTGACCCCCGAGATT |
| | | CCAGCAGGCCTGGGAGGCGGCGGATCTGGCGGCGGAGG |
| | | ATCTAGAGAAGGACCCGAGCTGTCCCCCGACGATCCCG |
| | | CTGGGCTGCTGGATCTGAGACAGGGCATGTTCGCTCAGC |
| | | TGGTGGCTCAGAATGTGCTGCTGATTGACGGACCTCTGA |
| | | GCTGGTACTCCGACCCAGGGCTGGCAGGGGTGTCCCTG |
| | | ACTGGGGGACTGTCCTACAAAGAAGATACAAAAGAACT |
| | | GGTGGTGGCTAAAGCTGGGGTGTACTATGTGTTTTTTCA |
| | | GCTGGAACTGAGGCGGGTGGTGGCTGGGGAGGGCTCAG |
| | | GATCTGTGTCCCTGGCTCTGCATCTGCAGCCACTGCGCT |
| | | CTGCAGCAGGGGCTGCAGCACTGGCCCTGACTGTGGAC |
| | | CTGCCCCCAGCTTCTTCCGAGGCCAGAAACAGCGCCTTC |
| | | GGGTTCCAAGGACGCCTGCTGCATCTGAGCGCCGGACA |
| | | GCGCCTGGGAGTGCATCTGCATACTGAAGCCAGAGCCC |
| | | GGCATGCTTGGCAGCTGACTCAGGGGGCAACTGTGCTG |
| | | GGACTGTTTCGCGTGACACCTGAGATCCCAGCCGGGCTC |
| 102 | nucleotide | GAGGTGCAGCTGCTCGAAAGCGGCGGAGGACTGGTGCA |
| | sequence of anti- | GCCTGGCGGCAGCCTGAGACTGTCTTGCGCCGCCAGCG |
| | FAP(4B9) Fc | GCTTCACCTTCAGCAGCTACGCCATGAGCTGGGTCCGCC |
| | knob monomeric | AGGCCCCTGGCAAGGGACTGGAATGGGTGTCCGCCATC |
| | 4-1BB (71-248) | ATCGGCTCTGGCGCCAGCACCTACTACGCCGACAGCGTG |
| | ligand | AAGGGCCGGTTCACCATCAGCCGGGACAACAGCAAGAA |
| | | CACCCTGTACCTGCAGATGAACAGCCTGCGGGCCGAGG |
| | | ACACCGCCGTGTACTACTGCGCCAAGGGATGGTTCGGC |
| | | GGCTTCAACTACTGGGGACAGGGCACCCTGGTCACAGT |
| | | GTCCAGCGCTAGCACCAAGGGCCCATCGGTCTTCCCCCT |
| | | GGCACCCTCCTCCAAGAGCACCTCTGGGGGCACAGCGG |
| | | CCCTGGGCTGCCTGGTCAAGGACTACTTCCCCGAACCGG |
| | | TGACGGTGTCGTGGAACTCAGGCGCCCTGACCAGCGGC |
| | | GTGCACACCTTCCCGGCTGTCCTACAGTCCTCAGGACTC |
| | | TACTCCCTCAGCAGCGTGGTGACCGTGCCCTCCAGCAGC |
| | | TTGGGCACCCAGACCTACATCTGCAACGTGAATCACAA |
| | | GCCCAGCAACACCAAGGTGGACAAGAAAGTTGAGCCCA |
| | | AATCTTGTGACAAAACTCACACATGCCCACCGTGCCCAG |
| | | CACCTGAAGCTGCAGGGGGACCGTCAGTCTTCCTCTTCC |
| | | CCCCAAAACCCAAGGACACCCTCATGATCTCCCGGACCC |
| | | CTGAGGTCACATGCGTGGTGGTGGACGTGAGCCACGAA |
| | | GACCCTGAGGTCAAGTTCAACTGGTACGTGGACGGCGT |
| | | GGAGGTGCATAATGCCAAGACAAAGCCGCGGGAGGAGC |
| | | AGTACAACAGCACGTACCGTGTGGTCAGCGTCCTCACCG |
| | | TCCTGCACCAGGACTGGCTGAATGGCAAGGAGTACAAG |
| | | TGCAAGGTCTCCAACAAAGCCCTCGGCGCCCCCATCGA |
| | | GAAAACCATCTCCAAAGCCAAAGGGCAGCCCCGAGAAC |
| | | CACAGGTGTACACCCTGCCCCCCTGCAGAGATGAGCTG |
| | | ACCAAGAACCAGGTGTCCCTGTGGTGTCTGGTCAAGGGC |
| | | TTCTACCCCAGCGATATCGCCGTGGAGTGGGAGAGCAA |
| | | CGGCCAGCCTGAGAACAACTACAAGACCACCCCCCCTG |
| | | TGCTGGACAGCGACGGCAGCTTCTTCCTGTACTCCAAAC |
| | | TGACCGTGGACAAGAGCCGGTGGCAGCAGGGCAACGTG |
| | | TTCAGCTGCAGCGTGATGCACGAGGCCCTGCACAACCA |
| | | CTACACCCAGAAGTCCCTGAGCCTGAGCCCCGGCGGAG |
| | | GCGGCGGAAGCGGAGGAGGAGGATCCAGAGAGGGCCC |
| | | TGAGCTGAGCCCTGATGATCCTGCCGGACTGCTGGACCT |
| | | GCGGCAGGGAATGTTTGCCCAGCTGGTGGCCCAGAACG |
| | | TGCTGCTGATCGATGGCCCCCTGTCCTGGTACAGCGATC |
| | | CTGGACTGGCTGGCGTGTCACTGACAGGCGGCCTGAGCT |
| | | ACAAAGAGGACACCAAAGAACTGGTGGTGGCCAAGGCC |
| | | GGCGTGTACTACGTGTTCTTTCAGCTGGAACTGCGGAGA |
| | | GTGGTGGCCGGCGAAGGATCTGGCTCTGTGTCTCTGGCC |
| | | CTGCATCTGCAGCCTCTGAGATCTGCTGCTGGCGCCGCT |
| | | GCTCTGGCACTGACAGTGGATCTGCCTCCTGCCAGCAGC |
| | | GAGGCCCGGAATAGCGCATTTGGGTTTCAAGGCAGGCT |
| | | GCTGCACCTGTCTGCCGGCCAGAGGCTGGGAGTGCATCT |
| | | GCACACAGAGGCCAGGGCTAGACACGCCTGGCAGCTGA |
| | | CACAGGGCGCTACAGTGCTGGGCCTGTTCAGAGTGACC |
| | | CCCGAGATTCCTGCCGGGCTC |
| 103 | nucleotide | GAGATCGTGCTGACCCAGTCCCCCGGCACCCTGTCTCTG |
| | sequence of anti- | AGCCCTGGCGAGAGAGCCACCCTGTCCTGCAGAGCCTC |
| | FAP (4B9) light | CCAGTCCGTGACCTCCTCCTACCTCGCCTGGTATCAGCA |
| | chain | GAAGCCCGGCCAGGCCCCTCGGCTGCTGATCAACGTGG |
| | | GCAGTCGGAGAGCCACCGGCATCCCTGACCGGTTCTCCG |
| | | GCTCTGGCTCCGGCACCGACTTCACCCTGACCATCTCCC |
| | | GGCTGGAACCCGAGGACTTCGCCGTGTACTACTGCCAGC |
| | | AGGGCATCATGCTGCCCCCCACCTTTGGCCAGGGCACCA |
| | | AGGTGGAAATCAAGCGTACGGTGGCTGCACCATCTGTCT |
| | | TCATCTTCCCGCCATCTGATGAGCAGTTGAAATCTGGAA |
| | | CTGCCTCTGTTGTGTGCCTGCTGAATAACTTCTATCCCAG |
| | | AGAGGCCAAAGTACAGTGGAAGGTGGATAACGCCCTCC |
| | | AATCGGGTAACTCCCAGGAGAGTGTCACAGAGCAGGAC |
| | | AGCAAGGACAGCACCTACAGCCTCAGCAGCACCCTGAC |
| | | GCTGAGCAAAGCAGACTACGAGAAACACAAAGTCTACG |
| | | CCTGCGAAGTCACCCATCAGGGCCTGAGCTCGCCCGTCA |
| | | CAAAGAGCTTCAACAGGGGAGAGTGT |
| 104 | Fc hole dimeric 4- | DKTHTCPPCPAPEAAGGPSVFLFPPKPKDTLMISRTPEVTC |
| | 1BB (71-248) | VVVDVSHEDPEVKFNWYVDGVEVHNAKTKPREEQYNSTY |
| | ligand chain | RVVSVLTVLHQDWLNGKEYKCKVSNKALGAPIEKTISKAK |
| | | GQPREPQVCTLPPSRDELTKNQVSLSCAVKGFYPSDIAVEW |
| | | ESNGQPENNYKTTPPVLDSDGSFFLVSKLTVDKSRWQQGN |
| | | VFSCSVMHEALHNHYTQKSLSLSPGGGGGSGGGGSREGPE |
| | | LSPDDPAGLLDLRQGMFAQLVAQNVLLIDGPLSWYSDPGL |
| | | AGVSLTGGLSYKEDTKELVVAKAGVYYVFFQLELRRVVA |
| | | GEGSGSVSLALHLQPLRSAAGAAALALTVDLPPASSEARN |
| | | SAFGFQGRLLHLSAGQRLGVHLHTEARARHAWQLTQGAT |
| | | VLGLFRVTPEIPAGLGGGGSGGGGSREGPELSPDDPAGLLD |
| | | LRQGMFAQLVAQNVLLIDGPLSWYSDPGLAGVSLTGGLSY |
| | | KEDTKELVVAKAGVYYVFFQLELRRVVAGEGSGSVSLAL |
| | | HLQPLRSAAGAAALALTVDLPPASSEARNSAFGFQGRLLH |
| | | LSAGQRLGVHLHTEARARHAWQLTQGATVLGLFRVTPEIP |
| | | AGL |
| 105 | anti-FAP(4B9) Fc | EVQLLESGGGLVQPGGSLRLSCAASGFTFSSYAMSWVRQA |
| | knob monomeric | PGKGLEWVSAIIGSGASTYYADSVKGRFTISRDNSKNTLYL |
| | 41-BB (71-248) | QMNSLRAEDTAVYYCAKGWFGGFNYWGQGTLVTVSSAS |
| | ligand | TKGPSVFPLAPSSKSTSGGTAALGCLVKDYFPEPVTVSWNS |
| | | GALTSGVHTFPAVLQSSGLYSLSSVVTVPSSSLGTQTYICN |
| | | VNHKPSNTKVDKKVEPKSCDKTHTCPPCPAPEAAGGPSVF |
| | | LFPPKPKDTLMISRTPEVTCVVVDVSHEDPEVKFNWYVDG |
| | | VEVHNAKTKPREEQYNSTYRVVSVLTVLHQDWLNGKEYK |
| | | CKVSNKALGAPIEKTISKAKGQPREPQVYTLPPCRDELTKN |
| | | QVSLWCLVKGFYPSDIAVEWESNGQPENNYKTTPPVLDSD |
| | | GSFFLYSKLTVDKSRWQQGNVFSCSVMHEALHNHYTQKS |
| | | LSLSPGGGGGSGGGGSREGPELSPDDPAGLLDLRQGMFAQ |
| | | LVAQNVLLIDGPLSWYSDPGLAGVSLTGGLSYKEDTKELV |
| | | VAKAGVYYVFFQLELRRVVAGEGSGSVSLALHLQPLRSAA |
| | | GAAALALTVDLPPASSEARNSAFGFQGRLLHLSAGQRLGV |
| | | HLHTEARARHAWQLTQGATVLGLFRVTPEIPAGL |
| 106 | anti-FAP(4B9) | EIVLTQSPGTLSLSPGERATLSCRASQSVTSSYLAWYQQKP |
| | light chain | GQAPRLLINVGSRRATGIPDRFSGSGSGTDFTLTISRLEPEDF |
| | | AVYYCQQGIMLPPTFGQGTKVEIKRTVAAPSVFIFPPSDEQ |
| | | LKSGTASVVCLLNNFYPREAKVQWKVDNALQSGNSQESV |
| | | TEQDSKDSTYSLSSTLTLSKADYEKHKVYACEVTHQGLSS |
| | | PVTKSFNRGEC |

[0664] Table 2 shows the cDNA and amino acid sequences of the monovalent FAP(4B9)-targeted 4-1BB ligand (71-248) trimer-containing Fc (kih) fusion antigen binding molecule (Construct 2.12).

TABLE 2
Sequences of FAP(4B9)-targeted human 4-1BB ligand trimer
containing Fc (kih) fusion molecule Construct 2.12

| SEQ ID | | |
|---|---|---|
| NO: | Description | Sequence |
| 107 | nucleotide | GACAAAACTCACACATGCCCACCGTGCCCAGCACCTGA |
| | sequence of Fc | AGCTGCAGGGGGACCGTCAGTCTTCCTCTTCCCCCCAAA |
| | hole monomeric | ACCCAAGGACACCCTCATGATCTCCCGGACCCCTGAGGT |
| | 4-1BBL (71-248) | CACATGCGTGGTGGTGGACGTGAGCCACGAAGACCCTG |
| | chain | AGGTCAAGTTCAACTGGTACGTGGACGGCGTGGAGGTG |
| | | CATAATGCCAAGACAAAGCCGCGGGAGGAGCAGTACAA |
| | | CAGCACGTACCGTGTGGTCAGCGTCCTCACCGTCCTGCA |
| | | CCAGGACTGGCTGAATGGCAAGGAGTACAAGTGCAAGG |
| | | TCTCCAACAAAGCCCTCGGCGCCCCCATCGAGAAAACC |
| | | ATCTCCAAAGCCAAAGGGCAGCCCCGAGAACCACAGGT |
| | | GTGCACCCTGCCCCCATCCCGGGATGAGCTGACCAAGA |
| | | ACCAGGTCAGCCTCTCGTGCGCAGTCAAAGGCTTCTATC |
| | | CCAGCGACATCGCCGTGGAGTGGGAGAGCAATGGGCAG |
| | | CCGGAGAACAACTACAAGACCACGCCTCCCGTGCTGGA |
| | | CTCCGACGGCTCCTTCTTCCTCGTGAGCAAGCTCACCGT |
| | | GGACAAGAGCAGGTGGCAGCAGGGGAACGTCTTCTCAT |
| | | GCTCCGTGATGCATGAGGCTCTGCACAACCACTACACGC |
| | | AGAAGAGCCTCTCCCTGTCTCCGGGTAGAGAGGGCCCT |
| | | GAGCTGAGCCCTGATGATCCTGCCGGACTGCTGGACCTG |
| | | CGGCAGGGAATGTTTGCCCAGCTGGTGGCCCAGAACGT |
| | | GCTGCTGATCGATGGCCCCCTGTCCTGGTACAGCGATCC |
| | | TGGACTGGCTGGCGTGTCACTGACAGGCGGCCTGAGCTA |
| | | CAAAGAGGACACCAAAGAACTGGTGGTGGCCAAGGCCG |
| | | GCGTGTACTACGTGTTCTTTCAGCTGGAACTGCGGAGAG |
| | | TGGTGGCCGGCGAAGGATCTGGCTCTGTGTCTCTGGCCC |
| | | TGCATCTGCAGCCTCTGAGATCTGCTGCTGGCGCCGCTG |
| | | CTCTGGCACTGACAGTGGATCTGCCTCCTGCCAGCAGCG |
| | | AGGCCCGGAATAGCGCATTTGGGTTTCAAGGCAGGCTG |
| | | CTGCACCTGTCTGCCGGCCAGAGGCTGGGAGTGCATCTG |
| | | CACACAGAGGCCAGGGCTAGACACGCCTGGCAGCTGAC |
| | | ACAGGGCGCTACAGTGCTGGGCCTGTTCAGAGTGACCC |
| | | CCGAGATTCCTGCCGGGCTC |
| 108 | nucleotide | GAGGTGCAGCTGCTCGAAAGCGGCGGAGGACTGGTGCA |
| | sequence of anti- | GCCTGGCGGCAGCCTGAGACTGTCTTGCGCCGCCAGCG |
| | FAP(4B9) Fc | GCTTCACCTTCAGCAGCTACGCCATGAGCTGGGTCCGCC |
| | knob dimeric 4- | AGGCCCCTGGCAAGGGACTGGAATGGGTGTCCGCCATC |
| | 1BB ligand (71- | ATCGGCTCTGGCGCCAGCACCTACTACGCCGACAGCGTG |
| | 248) | AAGGGCCGGTTCACCATCAGCCGGGACAACAGCAAGAA |
| | | CACCCTGTACCTGCAGATGAACAGCCTGCGGGCCGAGG |
| | | ACACCGCCGTGTACTACTGCGCCAAGGGATGGTTCGGC |
| | | GGCTTCAACTACTGGGGACAGGGCACCCTGGTCACAGT |
| | | GTCCAGCGCTAGCACCAAGGGCCCATCGGTCTTCCCCCT |
| | | GGCACCCTCCTCCAAGAGCACCTCTGGGGGCACAGCGG |
| | | CCCTGGGCTGCCTGGTCAAGGACTACTTCCCCGAACCGG |
| | | TGACGGTGTCGTGGAACTCAGGCGCCCTGACCAGCGGC |
| | | GTGCACACCTTCCCGGCTGTCCTACAGTCCTCAGGACTC |
| | | TACTCCCTCAGCAGCGTGGTGACCGTGCCCTCCAGCAGC |
| | | TTGGGCACCCAGACCTACATCTGCAACGTGAATCACAA |
| | | GCCCAGCAACACCAAGGTGGACAAGAAAGTTGAGCCCA |
| | | AATCTTGTGACAAAACTCACACATGCCCACCGTGCCCAG |
| | | CACCTGAAGCTGCAGGGGGACCGTCAGTCTTCCTCTTCC |
| | | CCCCAAAACCCAAGGACACCCTCATGATCTCCCGGACCC |
| | | CTGAGGTCACATGCGTGGTGGTGGACGTGAGCCACGAA |
| | | GACCCTGAGGTCAAGTTCAACTGGTACGTGGACGGCGT |
| | | GGAGGTGCATAATGCCAAGACAAAGCCGCGGGAGGAGC |
| | | AGTACAACAGCACGTACCGTGTGGTCAGCGTCCTCACCG |
| | | TCCTGCACCAGGACTGGCTGAATGGCAAGGAGTACAAG |
| | | TGCAAGGTCTCCAACAAAGCCCTCGGCGCCCCCATCGA |
| | | GAAAACCATCTCCAAAGCCAAAGGGCAGCCCCGAGAAC |
| | | CACAGGTGTACACCCTGCCCCCCTGCAGAGATGAGCTG |
| | | ACCAAGAACCAGGTGTCCCTGTGGTGTCTGGTCAAGGGC |
| | | TTCTACCCCAGCGATATCGCCGTGGAGTGGGAGAGCAA |
| | | CGGCCAGCCTGAGAACAACTACAAGACCACCCCCCCTG |
| | | TGCTGGACAGCGACGGCAGCTTCTTCCTGTACTCCAAAC |
| | | TGACCGTGGACAAGAGCCGGTGGCAGCAGGGCAACGTG |
| | | TTCAGCTGCAGCGTGATGCACGAGGCCCTGCACAACCA |
| | | CTACACCCAGAAGTCCCTGAGCCTGAGCCCCGGCAGAG |
| | | AGGGCCCTGAGCTGAGCCCTGATGATCCTGCCGGACTGC |
| | | TGGACCTGCGGCAGGGAATGTTTGCCCAGCTGGTGGCCC |
| | | AGAACGTGCTGCTGATCGATGGCCCCCTGTCCTGGTACA |
| | | GCGATCCTGGACTGGCTGGCGTGTCACTGACAGGCGGC |
| | | CTGAGCTACAAAGAGGACACCAAAGAACTGGTGGTGGC |
| | | CAAGGCCGGCGTGTACTACGTGTTCTTTCAGCTGGAACT |
| | | GCGGAGAGTGGTGGCCGGCGAAGGATCTGGCTCTGTGT |
| | | CTCTGGCCCTGCATCTGCAGCCTCTGAGATCTGCTGCTG |
| | | GCGCCGCTGCTCTGGCACTGACAGTGGATCTGCCTCCTG |
| | | CCAGCAGCGAGGCCCGGAATAGCGCATTTGGGTTTCAA |
| | | GGCAGGCTGCTGCACCTGTCTGCCGGCCAGAGGCTGGG |
| | | AGTGCATCTGCACACAGAGGCCAGGGCTAGACACGCCT |
| | | GGCAGCTGACACAGGGCGCTACAGTGCTGGGCCTGTTC |
| | | AGAGTGACCCCCGAGATTCCAGCAGGCCTGGGAGGCGG |
| | | CGGATCTGGCGGCGGAGGATCTAGAGAAGGACCCGAGC |
| | | TGTCCCCCGACGATCCCGCTGGGCTGCTGGATCTGAGAC |
| | | AGGGCATGTTCGCTCAGCTGGTGGCTCAGAATGTGCTGC |
| | | TGATTGACGGACCTCTGAGCTGGTACTCCGACCCAGGGC |
| | | TGGCAGGGGTGTCCCTGACTGGGGGACTGTCCTACAAA |
| | | GAAGATACAAAAGAACTGGTGGTGGCTAAAGCTGGGGT |
| | | GTACTATGTGTTTTTTCAGCTGGAACTGAGGCGGGTGGT |
| | | GGCTGGGGAGGGCTCAGGATCTGTGTCCCTGGCTCTGCA |
| | | TCTGCAGCCACTGCGCTCTGCAGCAGGGGCTGCAGCACT |
| | | GGCCCTGACTGTGGACCTGCCCCCAGCTTCTTCCGAGGC |
| | | CAGAAACAGCGCCTTCGGGTTCCAAGGACGCCTGCTGC |
| | | ATCTGAGCGCCGGACAGCGCCTGGGAGTGCATCTGCAT |
| | | ACTGAAGCCAGAGCCCGGCATGCTTGGCAGCTGACTCA |
| | | GGGGGCAACTGTGCTGGGACTGTTTCGCGTGACACCTGA |
| | | GATCCCAGCCGGGCTC |
| 103 | nucleotide | See Table 1 |
| | sequence of anti- | |
| | FAP(4B9) light | |
| | chain | |
| 109 | Fc hole | DKTHTCPPCPAPEAAGGPSVFLFPPKPKDTLMISRTPEVTC |
| | monomeric 4- | VVVDVSHEDPEVKFNWYVDGVEVHNAKTKPREEQYNSTY |
| | 1BB ligand (71- | RVVSVLTVLHQDWLNGKEYKCKVSNKALGAPIEKTISKAK |
| | 248) chain | GQPREPQVCTLPPSRDELTKNQVSLSCAVKGFYPSDIAVEW |
| | | ESNGQPENNYKTTPPVLDSDGSFFLVSKLTVDKSRWQQGN |
| | | VFSCSVMHEALHNHYTQKSLSLSPGREGPELSPDDPAGLL |
| | | DLRQGMFAQLVAQNVLLIDGPLSWYSDPGLAGVSLTGGLS |
| | | YKEDTKELVVAKAGVYYVFFQLELRRVVAGEGSGSVSLA |
| | | LHLQPLRSAAGAAALALTVDLPPASSEARNSAFGFQGRLL |
| | | HLSAGQRLGVHLHTEARARHAWQLTQGATVLGLFRVTPEI |
| | | PAGL |
| 110 | anti-FAP(4B9) Fc | EVQLLESGGGLVQPGGSLRLSCAASGFTFSSYAMSWVRQA |
| | knob dimeric 4- | PGKGLEWVSAIIGSGASTYYADSVKGRFTISRDNSKNTLYL |
| | 1BB ligand (71- | QMNSLRAEDTAVYYCAKGWFGGFNYWGQGTLVTVSSAS |
| | 248) | TKGPSVFPLAPSSKSTSGGTAALGCLVKDYFPEPVTVSWNS |
| | | GALTSGVHTFPAVLQSSGLYSLSSVVTVPSSSLGTQTYICN |
| | | VNHKPSNTKVDKKVEPKSCDKTHTCPPCPAPEAAGGPSVF |
| | | LFPPKPKDTLMISRTPEVTCVVVDVSHEDPEVKFNWYVDG |
| | | VEVHNAKTKPREEQYNSTYRVVSVLTVLHQDWLNGKEYK |
| | | CKVSNKALGAPIEKTISKAKGQPREPQVYTLPPCRDELTKN |
| | | QVSLWCLVKGFYPSDIAVEWESNGQPENNYKTTPPVLDSD |
| | | GSFFLYSKLTVDKSRWQQGNVFSCSVMHEALHNHYTQKS |
| | | LSLSPGREGPELSPDDPAGLLDLRQGMFAQLVAQNVLLID |
| | | GPLSWYSDPGLAGVSLTGGLSYKEDTKELVVAKAGVYYV |
| | | FFQLELRRVVAGEGSGSVSLALHLQPLRSAAGAAALALTV |
| | | DLPPASSEARNSAFGFQGRLLHLSAGQRLGVHLHTEARAR |
| | | HAWQLTQGATVLGLFRVTPEIPAGLGGGGSGGGGSREGPE |
| | | LSPDDPAGLLDLRQGMFAQLVAQNVLLIDGPLSWYSDPGL |
| | | AGVSLTGGLSYKEDTKELVVAKAGVYYVFFQLELRRVVA |
| | | GEGSGSVSLALHLQPLRSAAGAAALALTVDLPPASSEARN |
| | | SAFGFQGRLLHLSAGQRLGVHLHTEARARHAWQLTQGAT |
| | | VLGLFRVTPEIPAGL |
| 106 | anti-FAP(4B9) | See Table 1 |
| | light chain | |

[0665] Table 3 shows the cDNA and amino acid sequences of the monovalent FAP(28H1)-targeted 4-1BB ligand trimer-containing Fc (kih) fusion antigen binding molecule (Construct 1.11).

TABLE 3
Sequences of FAP(28H1)-targeted human 4-1BB ligand
trimer containing Fc (kih) fusion molecule Construct 1.11

| SEQ ID | | |
|---|---|---|
| NO: | Description | Sequence |
| 101 | nucleotide | See Table 1 |
| | sequence of Fc | |
| | hole dimeric 4- | |
| | 1BB ligand (71- | |
| | 248) chain | |
| 111 | nucleotide | GAAGTGCAGCTGCTGGAATCCGGCGGAGGCCTGGTGCA |
| | sequence of anti- | GCCTGGCGGATCTCTGAGACTGTCCTGCGCCGCCTCCGG |
| | FAP(28H1) Fc | CTTCACCTTCTCCTCCCACGCCATGTCCTGGGTCCGACA |
| | knob monomeric | GGCTCCTGGCAAAGGCCTGGAATGGGTGTCCGCCATCTG |
| | 4-1BB ligand (71- | GGCCTCCGGCGAGCAGTACTACGCCGACTCTGTGAAGG |
| | 248) | GCCGGTTCACCATCTCCCGGGACAACTCCAAGAACACCC |
| | | TGTACCTGCAGATGAACTCCCTGCGGGCCGAGGACACC |
| | | GCCGTGTACTACTGTGCCAAGGGCTGGCTGGGCAACTTC |
| | | GACTACTGGGGACAGGGCACCCTGGTCACCGTGTCCAG |
| | | CGCTAGCACCAAGGGCCCATCGGTCTTCCCCCTGGCACC |
| | | CTCCTCCAAGAGCACCTCTGGGGGCACAGCGGCCCTGG |
| | | GCTGCCTGGTCAAGGACTACTTCCCCGAACCGGTGACGG |
| | | TGTCGTGGAACTCAGGCGCCCTGACCAGCGGCGTGCAC |
| | | ACCTTCCCGGCTGTCCTACAGTCCTCAGGACTCTACTCC |
| | | CTCAGCAGCGTGGTGACCGTGCCCTCCAGCAGCTTGGGC |
| | | ACCCAGACCTACATCTGCAACGTGAATCACAAGCCCAG |
| | | CAACACCAAGGTGGACAAGAAAGTTGAGCCCAAATCTT |
| | | GTGACAAAACTCACACATGCCCACCGTGCCCAGCACCT |
| | | GAAGCTGCAGGGGGACCGTCAGTCTTCCTCTTCCCCCCA |
| | | AAACCCAAGGACACCCTCATGATCTCCCGGACCCCTGA |
| | | GGTCACATGCGTGGTGGTGGACGTGAGCCACGAAGACC |
| | | CTGAGGTCAAGTTCAACTGGTACGTGGACGGCGTGGAG |
| | | GTGCATAATGCCAAGACAAAGCCGCGGGAGGAGCAGTA |
| | | CAACAGCACGTACCGTGTGGTCAGCGTCCTCACCGTCCT |
| | | GCACCAGGACTGGCTGAATGGCAAGGAGTACAAGTGCA |
| | | AGGTCTCCAACAAAGCCCTCGGCGCCCCCATCGAGAAA |
| | | ACCATCTCCAAAGCCAAAGGGCAGCCCCGAGAACCACA |
| | | GGTGTACACCCTGCCCCCCTGCAGAGATGAGCTGACCA |
| | | AGAACCAGGTGTCCCTGTGGTGTCTGGTCAAGGGCTTCT |
| | | ACCCCAGCGATATCGCCGTGGAGTGGGAGAGCAACGGC |
| | | CAGCCTGAGAACAACTACAAGACCACCCCCCCTGTGCT |
| | | GGACAGCGACGGCAGCTTCTTCCTGTACTCCAAACTGAC |
| | | CGTGGACAAGAGCCGGTGGCAGCAGGGCAACGTGTTCA |
| | | GCTGCAGCGTGATGCACGAGGCCCTGCACAACCACTAC |
| | | ACCCAGAAGTCCCTGAGCCTGAGCCCCGGCGGAGGCGG |
| | | CGGAAGCGGAGGAGGAGGATCCAGAGAGGGCCCTGAG |
| | | CTGAGCCCTGATGATCCTGCCGGACTGCTGGACCTGCGG |
| | | CAGGGAATGTTTGCCCAGCTGGTGGCCCAGAACGTGCTG |
| | | CTGATCGATGGCCCCCTGTCCTGGTACAGCGATCCTGGA |
| | | CTGGCTGGCGTGTCACTGACAGGCGGCCTGAGCTACAA |
| | | AGAGGACACCAAAGAACTGGTGGTGGCCAAGGCCGGCG |
| | | TGTACTACGTGTTCTTTCAGCTGGAACTGCGGAGAGTGG |
| | | TGGCCGGCGAAGGATCTGGCTCTGTGTCTCTGGCCCTGC |
| | | ATCTGCAGCCTCTGAGATCTGCTGCTGGCGCCGCTGCTC |
| | | TGGCACTGACAGTGGATCTGCCTCCTGCCAGCAGCGAG |
| | | GCCCGGAATAGCGCATTTGGGTTTCAAGGCAGGCTGCTG |
| | | CACCTGTCTGCCGGCCAGAGGCTGGGAGTGCATCTGCAC |
| | | ACAGAGGCCAGGGCTAGACACGCCTGGCAGCTGACACA |
| | | GGGCGCTACAGTGCTGGGCCTGTTCAGAGTGACCCCCG |
| | | AGATTCCTGCCGGGCTC |
| 112 | nucleotide | GAGATCGTGCTGACCCAGTCCCCCGGCACCCTGTCTCTG |
| | sequence of anti- | AGCCCTGGCGAGAGAGCCACCCTGTCCTGCAGAGCCTC |
| | FAP(28H1) light | CCAGTCCGTGTCCCGGTCCTACCTCGCCTGGTATCAGCA |
| | chain | GAAGCCCGGCCAGGCCCCTCGGCTGCTGATCATCGGCG |
| | | CCTCTACCAGAGCCACCGGCATCCCTGACCGGTTCTCCG |
| | | GCTCTGGCTCCGGCACCGACTTCACCCTGACCATCTCCC |
| | | GGCTGGAACCCGAGGACTTCGCCGTGTACTACTGCCAGC |
| | | AGGGCCAGGTCATCCCTCCCACCTTTGGCCAGGGCACCA |
| | | AGGTGGAAATCAAGCGTACGGTGGCTGCACCATCTGTCT |
| | | TCATCTTCCCGCCATCTGATGAGCAGTTGAAATCTGGAA |
| | | CTGCCTCTGTTGTGTGCCTGCTGAATAACTTCTATCCCAG |
| | | AGAGGCCAAAGTACAGTGGAAGGTGGATAACGCCCTCC |
| | | AATCGGGTAACTCCCAGGAGAGTGTCACAGAGCAGGAC |
| | | AGCAAGGACAGCACCTACAGCCTCAGCAGCACCCTGAC |
| | | GCTGAGCAAAGCAGACTACGAGAAACACAAAGTCTACG |
| | | CCTGCGAAGTCACCCATCAGGGCCTGAGCTCGCCCGTCA |
| | | CAAAGAGCTTCAACAGGGGAGAGTGT |
| 104 | Fc hole dimeric 4- | See Table 1 |
| | 1BB ligand (71- | |
| | 248) chain | |
| 113 | anti-FAP(28H1) | EVQLLESGGGLVQPGGSLRLSCAASGFTFSSHAMSWVRQA |
| | Fc knob | PGKGLEWVSAIWASGEQYYADSVKGRFTISRDNSKNTLYL |
| | monomeric 4- | QMNSLRAEDTAVYYCAKGWLGNFDYWGQGTLVTVSSAS |
| | 1BB ligand (71- | TKGPSVFPLAPSSKSTSGGTAALGCLVKDYFPEPVTVSWNS |
| | 248) | GALTSGVHTFPAVLQSSGLYSLSSVVTVPSSSLGTQTYICN |
| | | VNHKPSNTKVDKKVEPKSCDKTHTCPPCPAPEAAGGPSVF |
| | | LFPPKPKDTLMISRTPEVTCVVVDVSHEDPEVKFNWYVDG |
| | | VEVHNAKTKPREEQYNSTYRVVSVLTVLHQDWLNGKEYK |
| | | CKVSNKALGAPIEKTISKAKGQPREPQVYTLPPCRDELTKN |
| | | QVSLWCLVKGFYPSDIAVEWESNGQPENNYKTTPPVLDSD |
| | | GSFFLYSKLTVDKSRWQQGNVFSCSVMHEALHNHYTQKS |
| | | LSLSPGGGGGSGGGGSREGPELSPDDPAGLLDLRQGMFAQ |
| | | LVAQNVLLIDGPLSWYSDPGLAGVSLTGGLSYKEDTKELV |
| | | VAKAGVYYVFFQLELRRVVAGEGSGSVSLALHLQPLRSAA |
| | | GAAALALTVDLPPASSEARNSAFGFQGRLLHLSAGQRLGV |
| | | HLHTEARARHAWQLTQGATVLGLFRVTPEIPAGL |
| 114 | anti-FAP(28H1) | EIVLTQSPGTLSLSPGERATLSCRASQSVSRSYLAWYQQKP |
| | light chain | GQAPRLLIIGASTRATGIPDRFSGSGSGTDFTLTISRLEPEDF |
| | | AVYYCQQGQVIPPTFGQGTKVEIKRTVAAPSVFIFPPSDEQ |
| | | LKSGTASVVCLLNNFYPREAKVQWKVDNALQSGNSQESV |
| | | TEQDSKDSTYSLSSTLTLSKADYEKHKVYACEVTHQGLSS |
| | | PVTKSFNRGEC |

[0666] Table 4 shows the cDNA and amino acid sequences of the monovalent FAP(28H1)-targeted 4-1BB ligand trimer-containing Fc (kih) fusion antigen binding molecule (Construct 1.12).

TABLE 4
Sequences of FAP(28H1)-targeted human 4-1BB ligand
trimer containing Fc (kih) fusion molecule Construct 1.12

| SEQ ID | | |
|---|---|---|
| NO: | Description | Sequence |
| 107 | nucleotide | See Table 2 |
| | sequence of Fc | |
| | hole monomeric | |
| | 4-1BB ligand (71- | |
| | 248) chain | |
| 115 | nucleotide | GAAGTGCAGCTGCTGGAATCCGGCGGAGGCCTGGTGCA |
| | sequence of anti- | GCCTGGCGGATCTCTGAGACTGTCCTGCGCCGCCTCCGG |
| | FAP(28H1) Fc | CTTCACCTTCTCCTCCCACGCCATGTCCTGGGTCCGACA |
| | knob dimeric 4- | GGCTCCTGGCAAAGGCCTGGAATGGGTGTCCGCCATCTG |
| | 1BB ligand (71- | GGCCTCCGGCGAGCAGTACTACGCCGACTCTGTGAAGG |
| | 248) | GCCGGTTCACCATCTCCCGGGACAACTCCAAGAACACCC |
| | | TGTACCTGCAGATGAACTCCCTGCGGGCCGAGGACACC |
| | | GCCGTGTACTACTGTGCCAAGGGCTGGCTGGGCAACTTC |
| | | GACTACTGGGGACAGGGCACCCTGGTCACCGTGTCCAG |
| | | CGCTAGCACCAAGGGCCCATCGGTCTTCCCCCTGGCACC |
| | | CTCCTCCAAGAGCACCTCTGGGGGCACAGCGGCCCTGG |
| | | GCTGCCTGGTCAAGGACTACTTCCCCGAACCGGTGACGG |
| | | TGTCGTGGAACTCAGGCGCCCTGACCAGCGGCGTGCAC |
| | | ACCTTCCCGGCTGTCCTACAGTCCTCAGGACTCTACTCC |
| | | CTCAGCAGCGTGGTGACCGTGCCCTCCAGCAGCTTGGGC |
| | | ACCCAGACCTACATCTGCAACGTGAATCACAAGCCCAG |
| | | CAACACCAAGGTGGACAAGAAAGTTGAGCCCAAATCTT |
| | | GTGACAAAACTCACACATGCCCACCGTGCCCAGCACCT |
| | | GAAGCTGCAGGGGGACCGTCAGTCTTCCTCTTCCCCCCA |
| | | AAACCCAAGGACACCCTCATGATCTCCCGGACCCCTGA |
| | | GGTCACATGCGTGGTGGTGGACGTGAGCCACGAAGACC |
| | | CTGAGGTCAAGTTCAACTGGTACGTGGACGGCGTGGAG |
| | | GTGCATAATGCCAAGACAAAGCCGCGGGAGGAGCAGTA |
| | | CAACAGCACGTACCGTGTGGTCAGCGTCCTCACCGTCCT |
| | | GCACCAGGACTGGCTGAATGGCAAGGAGTACAAGTGCA |
| | | AGGTCTCCAACAAAGCCCTCGGCGCCCCCATCGAGAAA |
| | | ACCATCTCCAAAGCCAAAGGGCAGCCCCGAGAACCACA |
| | | GGTGTACACCCTGCCCCCCTGCAGAGATGAGCTGACCA |
| | | AGAACCAGGTGTCCCTGTGGTGTCTGGTCAAGGGCTTCT |
| | | ACCCCAGCGATATCGCCGTGGAGTGGGAGAGCAACGGC |
| | | CAGCCTGAGAACAACTACAAGACCACCCCCCCTGTGCT |
| | | GGACAGCGACGGCAGCTTCTTCCTGTACTCCAAACTGAC |
| | | CGTGGACAAGAGCCGGTGGCAGCAGGGCAACGTGTTCA |
| | | GCTGCAGCGTGATGCACGAGGCCCTGCACAACCACTAC |
| | | ACCCAGAAGTCCCTGAGCCTGAGCCCCGGCAGAGAGGG |
| | | CCCTGAGCTGAGCCCTGATGATCCTGCCGGACTGCTGGA |
| | | CCTGCGGCAGGGAATGTTTGCCCAGCTGGTGGCCCAGA |
| | | ACGTGCTGCTGATCGATGGCCCCCTGTCCTGGTACAGCG |
| | | ATCCTGGACTGGCTGGCGTGTCACTGACAGGCGGCCTGA |
| | | GCTACAAAGAGGACACCAAAGAACTGGTGGTGGCCAAG |
| | | GCCGGCGTGTACTACGTGTTCTTTCAGCTGGAACTGCGG |
| | | AGAGTGGTGGCCGGCGAAGGATCTGGCTCTGTGTCTCTG |
| | | GCCCTGCATCTGCAGCCTCTGAGATCTGCTGCTGGCGCC |
| | | GCTGCTCTGGCACTGACAGTGGATCTGCCTCCTGCCAGC |
| | | AGCGAGGCCCGGAATAGCGCATTTGGGTTTCAAGGCAG |
| | | GCTGCTGCACCTGTCTGCCGGCCAGAGGCTGGGAGTGC |
| | | ATCTGCACACAGAGGCCAGGGCTAGACACGCCTGGCAG |
| | | CTGACACAGGGCGCTACAGTGCTGGGCCTGTTCAGAGTG |
| | | ACCCCCGAGATTCCAGCAGGCCTGGGAGGCGGCGGATC |
| | | TGGCGGCGGAGGATCTAGAGAAGGACCCGAGCTGTCCC |
| | | CCGACGATCCCGCTGGGCTGCTGGATCTGAGACAGGGC |
| | | ATGTTCGCTCAGCTGGTGGCTCAGAATGTGCTGCTGATT |
| | | GACGGACCTCTGAGCTGGTACTCCGACCCAGGGCTGGC |
| | | AGGGGTGTCCCTGACTGGGGGACTGTCCTACAAAGAAG |
| | | ATACAAAAGAACTGGTGGTGGCTAAAGCTGGGGTGTAC |
| | | TATGTGTTTTTTCAGCTGGAACTGAGGCGGGTGGTGGCT |
| | | GGGGAGGGCTCAGGATCTGTGTCCCTGGCTCTGCATCTG |
| | | CAGCCACTGCGCTCTGCAGCAGGGGCTGCAGCACTGGC |
| | | CCTGACTGTGGACCTGCCCCCAGCTTCTTCCGAGGCCAG |
| | | AAACAGCGCCTTCGGGTTCCAAGGACGCCTGCTGCATCT |
| | | GAGCGCCGGACAGCGCCTGGGAGTGCATCTGCATACTG |
| | | AAGCCAGAGCCCGGCATGCTTGGCAGCTGACTCAGGGG |
| | | GCAACTGTGCTGGGACTGTTTCGCGTGACACCTGAGATC |
| | | CCAGCCGGGCTC |
| 112 | nucleotide | See Table 3 |
| | sequence of anti- | |
| | FAP(28H1) light | |
| | chain | |
| 109 | Fc hole | See Table 2 |
| | monomeric 4- | |
| | 1BB ligand (71- | |
| | 248) chain | |
| 116 | anti-FAP(28H1) | EVQLLESGGGLVQPGGSLRLSCAASGFTFSSHAMSWVRQA |
| | Fc knob dimeric | PGKGLEWVSAIWASGEQYYADSVKGRFTISRDNSKNTLYL |
| | 4-1BB ligand (71- | QMNSLRAEDTAVYYCAKGWLGNFDYWGQGTLVTVSSAS |
| | 248) | TKGPSVFPLAPSSKSTSGGTAALGCLVKDYFPEPVTVSWNS |
| | | GALTSGVHTFPAVLQSSGLYSLSSVVTVPSSSLGTQTYICN |
| | | VNHKPSNTKVDKKVEPKSCDKTHTCPPCPAPEAAGGPSVF |
| | | LFPPKPKDTLMISRTPEVTCVVVDVSHEDPEVKFNWYVDG |
| | | VEVHNAKTKPREEQYNSTYRVVSVLTVLHQDWLNGKEYK |
| | | CKVSNKALGAPIEKTISKAKGQPREPQVYTLPPCRDELTKN |
| | | QVSLWCLVKGFYPSDIAVEWESNGQPENNYKTTPPVLDSD |
| | | GSFFLYSKLTVDKSRWQQGNVFSCSVMHEALHNHYTQKS |
| | | LSLSPGREGPELSPDDPAGLLDLRQGMFAQLVAQNVLLID |
| | | GPLSWYSDPGLAGVSLTGGLSYKEDTKELVVAKAGVYYV |
| | | FFQLELRRVVAGEGSGSVSLALHLQPLRSAAGAAALALTV |
| | | DLPPASSEARNSAFGFQGRLLHLSAGQRLGVHLHTEARAR |
| | | HAWQLTQGATVLGLFRVTPEIPAGLGGGGSGGGGSREGPE |
| | | LSPDDPAGLLDLRQGMFAQLVAQNVLLIDGPLSWYSDPGL |
| | | AGVSLTGGLSYKEDTKELVVAKAGVYYVFFQLELRRVVA |
| | | GEGSGSVSLALHLQPLRSAAGAAALALTVDLPPASSEARN |
| | | SAFGFQGRLLHLSAGQRLGVHLHTEARARHAWQLTQGAT |
| | | VLGLFRVTPEIPAGL |
| 114 | anti-FAP(28H1) | See Table 3 |
| | light chain | |

[0667] 1.2 Preparation of Monovalent CD19-Targeted 4-1BB Ligand Trimer-Containing Fc (kih) Fusion Antigen Binding Molecule, wherein the 4-1BB Ligands are C-Terminally Fused (Constructs 3.11, 4.11, 3.12 and 4.12) (CD19 on the Knob Chain)

[0668] The molecule was prepared as described in Example 1.1 for the monovalent FAP targeted construct, with the only difference that the anti-FAP binder was replaced by an anti-CD19 binder.

[0669] The variable region of heavy and light chain DNA sequences encoding a binder specific for CD19, clone 8B8-018 or clone 8B8-2B11, were subcloned in frame with either the constant heavy chain of the knob or the constant light chain of human IgG1. The generation of the CD19 clones is described in Example 1.3.

[0670] The Pro329Gly, Leu234Ala and Leu235Ala mutations have been introduced in the constant region of the knob and hole heavy chains to abrogate binding to Fc gamma receptors according to the method described in International Patent Appl. Publ. No. WO 2012/130831 A1.

[0671] For all constructs the knobs into holes heterodimerization technology was used as described in Carter, J Immunol Methods 248, 7-15 (2001). Combination of the huIgG1 Fc hole chain containing the Y349C/T366S/L368A/Y407V mutations in the CH3 domain, the anti-FAP huIgG1 knob chain containing the S354C/T366W mutations in the CH3 domain and the anti-FAP light chain allows generation of a heterodimer, which includes an assembled trimeric 4-1BB ligand and one CD19 binding Fab (FIGS. 2A and 2B).

[0672] Table 5 shows the cDNA and amino acid sequences of the monovalent CD19(8B8-018)-targeted 4-1BB ligand (71-248) trimer-containing Fc (kih) fusion antigen binding molecule (Construct 3.11).

TABLE 5
Sequences of CD19(8B8-018)-targeted human 4-1BB ligand
trimer containing Fc (kih) fusion molecule Construct 3.11

| SEQ ID | | |
|---|---|---|
| NO: | Description | Sequence |
| 101 | nucleotide | see Table 1 |
| | sequence of Fc | |
| | hole dimeric 4- | |
| | 1BB ligand (71- | |
| | 248) chain | |
| 117 | nucleotide | CAGGTCCAGCTGGTGCAGTCCGGCGCCGAGGTCAAGAA |
| | sequence of anti- | ACCCGGGGCTTCTGTGAAGGTTTCATGCAAGGCAAGCG |
| | CD19(8B8-018) | GATACACCTTCACCGACTATATCATGCATTGGGTCAGGC |
| | Fc knob | AGGCCCCTGGCCAAGGTCTCGAATGGATGGGCTACATTA |
| | monomeric 4- | ACCCATATAATGATGGCTCCAAATACACCGAGAAGTTTC |
| | 1BB (71-248) | AGGGAAGAGTCACTATGACATCTGACACCAGTATCAGC |
| | ligand | ACTGCTTACATGGAGCTGTCCCGCCTTCGGTCTGATGAC |
| | | ACCGCAGTGTATTACTGTGCCAGGGGCACATATTACTAC |
| | | GGCTCAGCTCTGTTCGACTATTGGGGGCAGGGAACCACA |
| | | GTAACCGTGAGCTCCGCTAGCACCAAGGGCCCATCGGT |
| | | CTTCCCCCTGGCACCCTCCTCCAAGAGCACCTCTGGGGG |
| | | CACAGCGGCCCTGGGCTGCCTGGTCAAGGACTACTTCCC |
| | | CGAACCGGTGACGGTGTCGTGGAACTCAGGCGCCCTGA |
| | | CCAGCGGCGTGCACACCTTCCCGGCTGTCCTACAGTCCT |
| | | CAGGACTCTACTCCCTCAGCAGCGTGGTGACCGTGCCCT |
| | | CCAGCAGCTTGGGCACCCAGACCTACATCTGCAACGTG |
| | | AATCACAAGCCCAGCAACACCAAGGTGGACAAGAAAGT |
| | | TGAGCCCAAATCTTGTGACAAAACTCACACATGCCCACC |
| | | GTGCCCAGCACCTGAAGCTGCAGGGGGACCGTCAGTCT |
| | | TCCTCTTCCCCCCAAAACCCAAGGACACCCTCATGATCT |
| | | CCCGGACCCCTGAGGTCACATGCGTGGTGGTGGACGTG |
| | | AGCCACGAAGACCCTGAGGTCAAGTTCAACTGGTACGT |
| | | GGACGGCGTGGAGGTGCATAATGCCAAGACAAAGCCGC |
| | | GGGAGGAGCAGTACAACAGCACGTACCGTGTGGTCAGC |
| | | GTCCTCACCGTCCTGCACCAGGACTGGCTGAATGGCAAG |
| | | GAGTACAAGTGCAAGGTCTCCAACAAAGCCCTCGGCGC |
| | | CCCCATCGAGAAAACCATCTCCAAAGCCAAAGGGCAGC |
| | | CCCGAGAACCACAGGTGTACACCCTGCCCCCCTGCAGA |
| | | GATGAGCTGACCAAGAACCAGGTGTCCCTGTGGTGTCTG |
| | | GTCAAGGGCTTCTACCCCAGCGATATCGCCGTGGAGTGG |
| | | GAGAGCAACGGCCAGCCTGAGAACAACTACAAGACCAC |
| | | CCCCCCTGTGCTGGACAGCGACGGCAGCTTCTTCCTGTA |
| | | CTCCAAACTGACCGTGGACAAGAGCCGGTGGCAGCAGG |
| | | GCAACGTGTTCAGCTGCAGCGTGATGCACGAGGCCCTG |
| | | CACAACCACTACACCCAGAAGTCCCTGAGCCTGAGCCC |
| | | CGGCGGAGGCGGCGGAAGCGGAGGAGGAGGATCCAGA |
| | | GAGGGCCCTGAGCTGAGCCCTGATGATCCTGCCGGACT |
| | | GCTGGACCTGCGGCAGGGAATGTTTGCCCAGCTGGTGGC |
| | | CCAGAACGTGCTGCTGATCGATGGCCCCCTGTCCTGGTA |
| | | CAGCGATCCTGGACTGGCTGGCGTGTCACTGACAGGCG |
| | | GCCTGAGCTACAAAGAGGACACCAAAGAACTGGTGGTG |
| | | GCCAAGGCCGGCGTGTACTACGTGTTCTTTCAGCTGGAA |
| | | CTGCGGAGAGTGGTGGCCGGCGAAGGATCTGGCTCTGT |
| | | GTCTCTGGCCCTGCATCTGCAGCCTCTGAGATCTGCTGC |
| | | TGGCGCCGCTGCTCTGGCACTGACAGTGGATCTGCCTCC |
| | | TGCCAGCAGCGAGGCCCGGAATAGCGCATTTGGGTTTCA |
| | | AGGCAGGCTGCTGCACCTGTCTGCCGGCCAGAGGCTGG |
| | | GAGTGCATCTGCACACAGAGGCCAGGGCTAGACACGCC |
| | | TGGCAGCTGACACAGGGCGCTACAGTGCTGGGCCTGTTC |
| | | AGAGTGACCCCCGAGATTCCTGCCGGGCTC |
| 118 | nucleotide | GACATCGTCATGACCCAGACACCCCTGTCCCTCTCTGTG |
| | sequence of anti- | ACCCCTGGCCAGCCAGCCTCAATTAGCTGCAAGTCCTCT |
| | CD19(8B8-018) | CAAAGTCTGGAGAACCCCAATGGGAACACTTACCTTAAT |
| | light chain | TGGTATCTGCAGAAACCCGGACAATCCCCTCAACTCCTG |
| | | ATCTACAGGGTCTCTAAGAGATTCTCAGGCGTGCCAGAT |
| | | CGCTTTAGCGGTTCCGGGTCTGGCACAGACTTCACCTTG |
| | | AAGATTAGTCGGGTTGAAGCTGAGGATGTGGGAGTCTA |
| | | TTACTGTCTGCAGCTCACTCATGTGCCCTACACCTTTGGT |
| | | CAGGGCACAAAACTGGAGATCAAGCGGACCGTGGCCGC |
| | | TCCCTCCGTGTTCATCTTCCCACCCTCCGACGAGCAGCT |
| | | GAAGTCCGGCACCGCCAGCGTGGTGTGCCTGCTGAACA |
| | | ACTTCTACCCCCGCGAGGCCAAGGTGCAGTGGAAGGTG |
| | | GACAACGCCCTGCAGTCCGGCAACTCCCAGGAATCCGT |
| | | GACCGAGCAGGACTCCAAGGACAGCACCTACTCCCTGT |
| | | CCTCCACCCTGACCCTGTCCAAGGCCGACTACGAGAAGC |
| | | ACAAGGTGTACGCCTGCGAAGTGACCCACCAGGGCCTG |
| | | TCCAGCCCCGTGACCAAGTCCTTCAACCGGGGCGAGTGC |
| 104 | Fc hole dimeric 4- | see Table 1 |
| | 1BB (71-248) | |
| | ligand chain | |
| 119 | anti-CD19(8B8- | QVQLVQSGAEVKKPGASVKVSCKASGYTFTDYIMHWVRQ |
| | 018) Fc knob | APGQGLEWMGYINPYNDGSKYTEKFQGRVTMTSDTSISTA |
| | monomeric 4-1- | YMELSRLRSDDTAVYYCARGTYYYGSALFDYWGQGTTVT |
| | BB (71-248) | VSSASTKGPSVFPLAPSSKSTSGGTAALGCLVKDYFPEPVT |
| | ligand | VSWNSGALTSGVHTFPAVLQSSGLYSLSSVVTVPSSSLGTQ |
| | | TYICNVNHKPSNTKVDKKVEPKSCDKTHTCPPCPAPEAAG |
| | | GPSVFLFPPKPKDTLMISRTPEVTCVVVDVSHEDPEVKFNW |
| | | YVDGVEVHNAKTKPREEQYNSTYRVVSVLTVLHQDWLN |
| | | GKEYKCKVSNKALGAPIEKTISKAKGQPREPQVYTLPPCRD |
| | | ELTKNQVSLWCLVKGFYPSDIAVEWESNGQPENNYKTTPP |
| | | VLDSDGSFFLYSKLTVDKSRWQQGNVFSCSVMHEALHNH |
| | | YTQKSLSLSPGGGGGSGGGGSREGPELSPDDPAGLLDLRQ |
| | | GMFAQLVAQNVLLIDGPLSWYSDPGLAGVSLTGGLSYKED |
| | | TKELVVAKAGVYYVFFQLELRRVVAGEGSGSVSLALHLQP |
| | | LRSAAGAAALALTVDLPPASSEARNSAFGFQGRLLHLSAG |
| | | QRLGVHLHTEARARHAWQLTQGATVLGLFRVTPEIPAGL |
| 120 | anti-CD19(8B8- | DIVMTQTPLSLSVTPGQPASISCKSSQSLENPNGNTYLNWY |
| | 018) light chain | LQKPGQSPQLLIYRVSKRFSGVPDRFSGSGSGTDFTLKISRV |
| | | EAEDVGVYYCLQLTHVPYTFGQGTKLEIKRTVAAPSVFIFP |
| | | PSDEQLKSGTASVVCLLNNFYPREAKVQWKVDNALQSGN |
| | | SQESVTEQDSKDSTYSLSSTLTLSKADYEKHKVYACEVTH |
| | | QGLSSPVTKSFNRGEC |

[0673] Table 6 shows the cDNA and amino acid sequences of the monovalent CD19(8B8-018)-targeted 4-1BB ligand (71-248) trimer-containing Fc (kih) fusion antigen binding molecule (Construct 3.12).

TABLE 2
Sequences of CD19 (B8-018) targeted human 4-1BB ligand
trimer containing Fc (kih) fusion molecule Construct 3.12

| SEQ ID | | |
|---|---|---|
| NO: | Description | Sequence |
| 107 | nucleotide | see Table 2 |
| | sequence of Fc | |
| | hole monomeric | |
| | 4-1BBL (71-248) | |
| | chain | |
| 121 | nucleotide | CAGGTCCAGCTGGTGCAGTCCGGCGCCGAGGTCAAGAA |
| | sequence of anti- | ACCCGGGGCTTCTGTGAAGGTTTCATGCAAGGCAAGCG |
| | CD19(8B8-018) | GATACACCTTCACCGACTATATCATGCATTGGGTCAGGC |
| | Fc knob dimeric | AGGCCCCTGGCCAAGGTCTCGAATGGATGGGCTACATTA |
| | 4-1BB (71-248) | ACCCATATAATGATGGCTCCAAATACACCGAGAAGTTTC |
| | ligand | AGGGAAGAGTCACTATGACATCTGACACCAGTATCAGC |
| | | ACTGCTTACATGGAGCTGTCCCGCCTTCGGTCTGATGAC |
| | | ACCGCAGTGTATTACTGTGCCAGGGGCACATATTACTAC |
| | | GGCTCAGCTCTGTTCGACTATTGGGGGCAGGGAACCACA |
| | | GTAACCGTGAGCTCCGCTAGCACCAAGGGCCCATCGGT |
| | | CTTCCCCCTGGCACCCTCCTCCAAGAGCACCTCTGGGGG |
| | | CACAGCGGCCCTGGGCTGCCTGGTCAAGGACTACTTCCC |
| | | CGAACCGGTGACGGTGTCGTGGAACTCAGGCGCCCTGA |
| | | CCAGCGGCGTGCACACCTTCCCGGCTGTCCTACAGTCCT |
| | | CAGGACTCTACTCCCTCAGCAGCGTGGTGACCGTGCCCT |
| | | CCAGCAGCTTGGGCACCCAGACCTACATCTGCAACGTG |
| | | AATCACAAGCCCAGCAACACCAAGGTGGACAAGAAAGT |
| | | TGAGCCCAAATCTTGTGACAAAACTCACACATGCCCACC |
| | | GTGCCCAGCACCTGAAGCTGCAGGGGGACCGTCAGTCT |
| | | TCCTCTTCCCCCCAAAACCCAAGGACACCCTCATGATCT |
| | | CCCGGACCCCTGAGGTCACATGCGTGGTGGTGGACGTG |
| | | AGCCACGAAGACCCTGAGGTCAAGTTCAACTGGTACGT |
| | | GGACGGCGTGGAGGTGCATAATGCCAAGACAAAGCCGC |
| | | GGGAGGAGCAGTACAACAGCACGTACCGTGTGGTCAGC |
| | | GTCCTCACCGTCCTGCACCAGGACTGGCTGAATGGCAAG |
| | | GAGTACAAGTGCAAGGTCTCCAACAAAGCCCTCGGCGC |
| | | CCCCATCGAGAAAACCATCTCCAAAGCCAAAGGGCAGC |
| | | CCCGAGAACCACAGGTGTACACCCTGCCCCCCTGCAGA |
| | | GATGAGCTGACCAAGAACCAGGTGTCCCTGTGGTGTCTG |
| | | GTCAAGGGCTTCTACCCCAGCGATATCGCCGTGGAGTGG |
| | | GAGAGCAACGGCCAGCCTGAGAACAACTACAAGACCAC |
| | | CCCCCCTGTGCTGGACAGCGACGGCAGCTTCTTCCTGTA |
| | | CTCCAAACTGACCGTGGACAAGAGCCGGTGGCAGCAGG |
| | | GCAACGTGTTCAGCTGCAGCGTGATGCACGAGGCCCTG |
| | | CACAACCACTACACCCAGAAGTCCCTGAGCCTGAGCCC |
| | | CGGCAGAGAGGGCCCTGAGCTGAGCCCTGATGATCCTG |
| | | CCGGACTGCTGGACCTGCGGCAGGGAATGTTTGCCCAG |
| | | CTGGTGGCCCAGAACGTGCTGCTGATCGATGGCCCCCTG |
| | | TCCTGGTACAGCGATCCTGGACTGGCTGGCGTGTCACTG |
| | | ACAGGCGGCCTGAGCTACAAAGAGGACACCAAAGAACT |
| | | GGTGGTGGCCAAGGCCGGCGTGTACTACGTGTTCTTTCA |
| | | GCTGGAACTGCGGAGAGTGGTGGCCGGCGAAGGATCTG |
| | | GCTCTGTGTCTCTGGCCCTGCATCTGCAGCCTCTGAGAT |
| | | CTGCTGCTGGCGCCGCTGCTCTGGCACTGACAGTGGATC |
| | | TGCCTCCTGCCAGCAGCGAGGCCCGGAATAGCGCATTTG |
| | | GGTTTCAAGGCAGGCTGCTGCACCTGTCTGCCGGCCAGA |
| | | GGCTGGGAGTGCATCTGCACACAGAGGCCAGGGCTAGA |
| | | CACGCCTGGCAGCTGACACAGGGCGCTACAGTGCTGGG |
| | | CCTGTTCAGAGTGACCCCCGAGATTCCAGCAGGCCTGGG |
| | | AGGCGGCGGATCTGGCGGCGGAGGATCTAGAGAAGGAC |
| | | CCGAGCTGTCCCCCGACGATCCCGCTGGGCTGCTGGATC |
| | | TGAGACAGGGCATGTTCGCTCAGCTGGTGGCTCAGAATG |
| | | TGCTGCTGATTGACGGACCTCTGAGCTGGTACTCCGACC |
| | | CAGGGCTGGCAGGGGTGTCCCTGACTGGGGGACTGTCCT |
| | | ACAAAGAAGATACAAAAGAACTGGTGGTGGCTAAAGCT |
| | | GGGGTGTACTATGTGTTTTTTCAGCTGGAACTGAGGCGG |
| | | GTGGTGGCTGGGGAGGGCTCAGGATCTGTGTCCCTGGCT |
| | | CTGCATCTGCAGCCACTGCGCTCTGCAGCAGGGGCTGCA |
| | | GCACTGGCCCTGACTGTGGACCTGCCCCCAGCTTCTTCC |
| | | GAGGCCAGAAACAGCGCCTTCGGGTTCCAAGGACGCCT |
| | | GCTGCATCTGAGCGCCGGACAGCGCCTGGGAGTGCATC |
| | | TGCATACTGAAGCCAGAGCCCGGCATGCTTGGCAGCTG |
| | | ACTCAGGGGGCAACTGTGCTGGGACTGTTTCGCGTGACA |
| | | CCTGAGATCCCAGCCGGGCTC |
| 118 | nucleotide | See Table 5 |
| | sequence of anti- | |
| | CD19 (8B8-018) | |
| | light chain | |
| 109 | Fc hole | see Table 2 |
| | monomeric 4- | |
| | 1BB ligand (71- | |
| | 248) chain | |
| 122 | anti-CD19(8B8- | QVQLVQSGAEVKKPGASVKVSCKASGYTFTDYIMHWVRQ |
| | 018) Fc knob | APGQGLEWMGYINPYNDGSKYTEKFQGRVTMTSDTSISTA |
| | dimeric 4-1BB | YMELSRLRSDDTAVYYCARGTYYYGSALFDYWGQGTTVT |
| | (71-248) ligand | VSSASTKGPSVFPLAPSSKSTSGGTAALGCLVKDYFPEPVT |
| | | VSWNSGALTSGVHTFPAVLQSSGLYSLSSVVTVPSSSLGTQ |
| | | TYICNVNHKPSNTKVDKKVEPKSCDKTHTCPPCPAPEAAG |
| | | GPSVFLFPPKPKDTLMISRTPEVTCVVVDVSHEDPEVKFNW |
| | | YVDGVEVHNAKTKPREEQYNSTYRVVSVLTVLHQDWLN |
| | | GKEYKCKVSNKALGAPIEKTISKAKGQPREPQVYTLPPCRD |
| | | ELTKNQVSLWCLVKGFYPSDIAVEWESNGQPENNYKTTPP |
| | | VLDSDGSFFLYSKLTVDKSRWQQGNVFSCSVMHEALHNH |
| | | YTQKSLSLSPGREGPELSPDDPAGLLDLRQGMFAQLVAQN |
| | | VLLIDGPLSWYSDPGLAGVSLTGGLSYKEDTKELVVAKAG |
| | | VYYVFFQLELRRVVAGEGSGSVSLALHLQPLRSAAGAAAL |
| | | ALTVDLPPASSEARNSAFGFQGRLLHLSAGQRLGVHLHTE |
| | | ARARHAWQLTQGATVLGLFRVTPEIPAGLGGGGSGGGGS |
| | | REGPELSPDDPAGLLDLRQGMFAQLVAQNVLLIDGPLSWY |
| | | SDPGLAGVSLTGGLSYKEDTKELVVAKAGVYYVFFQLELR |
| | | RVVAGEGSGSVSLALHLQPLRSAAGAAALALTVDLPPASS |
| | | EARNSAFGFQGRLLHLSAGQRLGVHLHTEARARHAWQLT |
| | | QGATVLGLFRVTPEIPAGL |
| 120 | anti-CD19(8B8- | See Table 5 |
| | 018) light chain | |

[0674] Table 7 shows the cDNA and amino acid sequences of the monovalent CD19 (8B8-2B11)-targeted 4-1BB ligand trimer-containing Fc (kih) fusion antigen binding molecule (Construct 4.11).

TABLE 7
Sequences of CD19(2B11)-targeted human 4-1BB ligand
trimer containing Fc (kih) fusion molecule Construct 4.11

| SEQ ID | | |
|---|---|---|
| NO: | Description | Sequence |
| 101 | nucleotide | See Table 1 |
| | sequence of Fc | |
| | hole dimeric 4- | |
| | 1BB ligand (71- | |
| | 248) chain | |
| 123 | nucleotide | CAGGTGCAATTGGTTCAATCTGGTGCTGAAGTAAAAAA |
| | sequence of anti- | ACCGGGCGCTTCCGTTAAAGTGAGCTGCAAAGCATCTGG |
| | CD19(8B8-2B11) | TTACACCTTCACTGACTATATCATGCACTGGGTTCGTCA |
| | Fc knob | GGCCCCGGGCCAGGGTCTGGAGTGGATGGGCTACATTA |
| | monomeric 4- | ACCCATACAACGACGGTTCCAAATATACCGAGAAATTC |
| | 1BB (71-248) | CAGGGCCGCGTCACGATGACCAGCGACACTTCTATCTCC |
| | ligand | ACCGCGTACATGGAACTGTCTAGACTGCGTTCTGACGAC |
| | | ACCGCTGTTTACTATTGTGCACGCGGTACCTACTACTAC |
| | | GGTCCACAGCTGTTTGATTACTGGGGCCAAGGTACCACG |
| | | GTGACCGTAAGCTCTGCTAGCACCAAGGGCCCATCGGTC |
| | | TTCCCCCTGGCACCCTCCTCCAAGAGCACCTCTGGGGGC |
| | | ACAGCGGCCCTGGGCTGCCTGGTCAAGGACTACTTCCCC |
| | | GAACCGGTGACGGTGTCGTGGAACTCAGGCGCCCTGAC |
| | | CAGCGGCGTGCACACCTTCCCGGCTGTCCTACAGTCCTC |
| | | AGGACTCTACTCCCTCAGCAGCGTGGTGACCGTGCCCTC |
| | | CAGCAGCTTGGGCACCCAGACCTACATCTGCAACGTGA |
| | | ATCACAAGCCCAGCAACACCAAGGTGGACAAGAAAGTT |
| | | GAGCCCAAATCTTGTGACAAAACTCACACATGCCCACC |
| | | GTGCCCAGCACCTGAAGCTGCAGGGGGACCGTCAGTCT |
| | | TCCTCTTCCCCCCAAAACCCAAGGACACCCTCATGATCT |
| | | CCCGGACCCCTGAGGTCACATGCGTGGTGGTGGACGTG |
| | | AGCCACGAAGACCCTGAGGTCAAGTTCAACTGGTACGT |
| | | GGACGGCGTGGAGGTGCATAATGCCAAGACAAAGCCGC |
| | | GGGAGGAGCAGTACAACAGCACGTACCGTGTGGTCAGC |
| | | GTCCTCACCGTCCTGCACCAGGACTGGCTGAATGGCAAG |
| | | GAGTACAAGTGCAAGGTCTCCAACAAAGCCCTCGGCGC |
| | | CCCCATCGAGAAAACCATCTCCAAAGCCAAAGGGCAGC |
| | | CCCGAGAACCACAGGTGTACACCCTGCCCCCCTGCAGA |
| | | GATGAGCTGACCAAGAACCAGGTGTCCCTGTGGTGTCTG |
| | | GTCAAGGGCTTCTACCCCAGCGATATCGCCGTGGAGTGG |
| | | GAGAGCAACGGCCAGCCTGAGAACAACTACAAGACCAC |
| | | CCCCCCTGTGCTGGACAGCGACGGCAGCTTCTTCCTGTA |
| | | CTCCAAACTGACCGTGGACAAGAGCCGGTGGCAGCAGG |
| | | GCAACGTGTTCAGCTGCAGCGTGATGCACGAGGCCCTG |
| | | CACAACCACTACACCCAGAAGTCCCTGAGCCTGAGCCC |
| | | CGGCGGAGGCGGCGGAAGCGGAGGAGGAGGATCCAGA |
| | | GAGGGCCCTGAGCTGAGCCCTGATGATCCTGCCGGACT |
| | | GCTGGACCTGCGGCAGGGAATGTTTGCCCAGCTGGTGGC |
| | | CCAGAACGTGCTGCTGATCGATGGCCCCCTGTCCTGGTA |
| | | CAGCGATCCTGGACTGGCTGGCGTGTCACTGACAGGCG |
| | | GCCTGAGCTACAAAGAGGACACCAAAGAACTGGTGGTG |
| | | GCCAAGGCCGGCGTGTACTACGTGTTCTTTCAGCTGGAA |
| | | CTGCGGAGAGTGGTGGCCGGCGAAGGATCTGGCTCTGT |
| | | GTCTCTGGCCCTGCATCTGCAGCCTCTGAGATCTGCTGC |
| | | TGGCGCCGCTGCTCTGGCACTGACAGTGGATCTGCCTCC |
| | | TGCCAGCAGCGAGGCCCGGAATAGCGCATTTGGGTTTCA |
| | | AGGCAGGCTGCTGCACCTGTCTGCCGGCCAGAGGCTGG |
| | | GAGTGCATCTGCACACAGAGGCCAGGGCTAGACACGCC |
| | | TGGCAGCTGACACAGGGCGCTACAGTGCTGGGCCTGTTC |
| | | AGAGTGACCCCCGAGATTCCTGCCGGGCTC |
| 124 | nucleotide | GATATTGTCATGACTCAAACTCCACTGTCTCTGTCCGTG |
| | sequence of anti- | ACCCCGGGTCAGCCAGCGAGCATTTCTTGCAAATCCAGC |
| | CD19(8B8-2B11) | CAATCTCTGGAAACCTCCACCGGCACCACGTACCTGAAC |
| | light chain | TGGTATCTCCAGAAACCGGGTCAGAGCCCGCAGCTGCT |
| | | GATCTACCGTGTATCTAAGCGCTTCTCCGGCGTTCCTGA |
| | | TCGTTTCAGCGGTTCTGGATCCGGCACCGACTTTACTCT |
| | | GAAAATCAGCCGTGTGGAAGCTGAAGACGTTGGCGTCT |
| | | ACTATTGTCTGCAGCTGCTGGAAGATCCATACACCTTCG |
| | | GTCAAGGAACTAAACTGGAAATTAAACGTACGGTGGCT |
| | | GCACCATCTGTCTTCATCTTCCCGCCATCTGATGAGCAG |
| | | TTGAAATCTGGAACTGCCTCTGTTGTGTGCCTGCTGAAT |
| | | AACTTCTATCCCAGAGAGGCCAAAGTACAGTGGAAGGT |
| | | GGATAACGCCCTCCAATCGGGTAACTCCCAGGAGAGTG |
| | | TCACAGAGCAGGACAGCAAGGACAGCACCTACAGCCTC |
| | | AGCAGCACCCTGACGCTGAGCAAAGCAGACTACGAGAA |
| | | ACACAAAGTCTACGCCTGCGAAGTCACCCATCAGGGCC |
| | | TGAGCTCGCCCGTCACAAAGAGCTTCAACAGGGGAGAG |
| | | TGTGATATTGTCATGACTCAAACTCCACTGTCTCTGTCCG |
| | | TGACCCCGGGTCAGCCAGCGAGCATTTCTTGCAAATCCA |
| | | GCCAATCTCTGGAAACCTCCACCGGCACCACGTACCTGA |
| | | ACTGGTATCTCCAGAAACCGGGTCAGAGCCCGCAGCTG |
| | | CTGATCTACCGTGTATCTAAGCGCTTCTCCGGCGTTCCTG |
| | | ATCGTTTCAGCGGTTCTGGATCCGGCACCGACTTTACTC |
| | | TGAAAATCAGCCGTGTGGAAGCTGAAGACGTTGGCGTC |
| | | TACTATTGTCTGCAGCTGCTGGAAGATCCATACACCTTC |
| | | GGTCAAGGAACGAAACTGGAAATTAAACGTACGGTGGC |
| | | TGCACCATCTGTCTTCATCTTCCCGCCATCTGATGAGCA |
| | | GTTGAAATCTGGAACTGCCTCTGTTGTGTGCCTGCTGAA |
| | | TAACTTCTATCCCAGAGAGGCCAAAGTACAGTGGAAGG |
| | | TGGATAACGCCCTCCAATCGGGTAACTCCCAGGAGAGT |
| | | GTCACAGAGCAGGACAGCAAGGACAGCACCTACAGCCT |
| | | CAGCAGCACCCTGACGCTGAGCAAAGCAGACTACGAGA |
| | | AACACAAAGTCTACGCCTGCGAAGTCACCCATCAGGGC |
| | | CTGAGCTCGCCCGTCACAAAGAGCTTCAACAGGGGAGA |
| | | GTGT |
| 104 | Fc hole dimeric 4- | See Table 1 |
| | 1BB ligand (71- | |
| | 248) chain | |
| 125 | anti-CD19(8B8- | QVQLVQSGAEVKKPGASVKVSCKASGYTFTDYIMHWVRQ |
| | 2B11) Fc knob | APGQGLEWMGYINPYNDGSKYTEKFQGRVTMTSDTSISTA |
| | monomeric 4- | YMELSRLRSDDTAVYYCARGTYYYGPQLFDYWGQGTTVT |
| | 1BB ligand (71- | VSSASTKGPSVFPLAPSSKSTSGGTAALGCLVKDYFPEPVT |
| | 248) | VSWNSGALTSGVHTFPAVLQSSGLYSLSSVVTVPSSSLGTQ |
| | | TYICNVNHKPSNTKVDKKVEPKSCDKTHTCPPCPAPEAAG |
| | | GPSVFLFPPKPKDTLMISRTPEVTCVVVDVSHEDPEVKFNW |
| | | YVDGVEVHNAKTKPREEQYNSTYRVVSVLTVLHQDWLN |
| | | GKEYKCKVSNKALGAPIEKTISKAKGQPREPQVYTLPPCRD |
| | | ELTKNQVSLWCLVKGFYPSDIAVEWESNGQPENNYKTTPP |
| | | VLDSDGSFFLYSKLTVDKSRWQQGNVFSCSVMHEALHNH |
| | | YTQKSLSLSPGGGGGSGGGGSREGPELSPDDPAGLLDLRQ |
| | | GMFAQLVAQNVLLIDGPLSWYSDPGLAGVSLTGGLSYKED |
| | | TKELVVAKAGVYYVFFQLELRRVVAGEGSGSVSLALHLQP |
| | | LRSAAGAAALALTVDLPPASSEARNSAFGFQGRLLHLSAG |
| | | QRLGVHLHTEARARHAWQLTQGATVLGLFRVTPEIPAGL |
| 126 | anti-CD19(8B8- | DIVMTQTPLSLSVTPGQPASISCKSSQSLETSTGTTYLNWYL |
| | 2B11) light chain | QKPGQSPQLLIYRVSKRFSGVPDRFSGSGSGTDFTLKISRVE |
| | | AEDVGVYYCLQLLEDPYTFGQGTKLEIKRTVAAPSVFIFPP |
| | | SDEQLKSGTASVVCLLNNFYPREAKVQWKVDNALQSGNS |
| | | QESVTEQDSKDSTYSLSSTLTLSKADYEKHKVYACEVTHQ |
| | | GLSSPVTKSFNRGEC |

[0675] Table 8 shows the cDNA and amino acid sequences of the monovalent CD19(8B8-2B11) targeted 4-1BB ligand trimer-containing Fc (kih) fusion antigen binding molecule (Construct 4.12).

TABLE 8
Sequences of CD19(8B8-2B11)-targeted human 4-1BB ligand
trimer containing Fc (kih) fusion molecule Construct 4.12

| SEQ ID | | |
|---|---|---|
| NO: | Description | Sequence |
| 107 | nucleotide | See Table 2 |
| | sequence of Fc | |
| | hole monomeric | |
| | 4-1BB ligand (71- | |
| | 248) chain | |
| 127 | nucleotide | CAGGTGCAATTGGTTCAATCTGGTGCTGAAGTAAAAAA |
| | sequence of anti- | ACCGGGCGCTTCCGTTAAAGTGAGCTGCAAAGCATCTGG |
| | CD19(8B8-2B11) | TTACACCTTCACTGACTATATCATGCACTGGGTTCGTCA |
| | Fc knob dimeric | GGCCCCGGGCCAGGGTCTGGAGTGGATGGGCTACATTA |
| | 4-1BB (71-248) | ACCCATACAACGACGGTTCCAAATATACCGAGAAATTC |
| | ligand | CAGGGCCGCGTCACGATGACCAGCGACACTTCTATCTCC |
| | | ACCGCGTACATGGAACTGTCTAGACTGCGTTCTGACGAC |
| | | ACCGCTGTTTACTATTGTGCACGCGGTACCTACTACTAC |
| | | GGTCCACAGCTGTTTGATTACTGGGGCCAAGGTACCACG |
| | | GTGACCGTAAGCTCTGCTAGCACCAAGGGCCCATCGGTC |
| | | TTCCCCCTGGCACCCTCCTCCAAGAGCACCTCTGGGGGC |
| | | ACAGCGGCCCTGGGCTGCCTGGTCAAGGACTACTTCCCC |
| | | GAACCGGTGACGGTGTCGTGGAACTCAGGCGCCCTGAC |
| | | CAGCGGCGTGCACACCTTCCCGGCTGTCCTACAGTCCTC |
| | | AGGACTCTACTCCCTCAGCAGCGTGGTGACCGTGCCCTC |
| | | CAGCAGCTTGGGCACCCAGACCTACATCTGCAACGTGA |
| | | ATCACAAGCCCAGCAACACCAAGGTGGACAAGAAAGTT |
| | | GAGCCCAAATCTTGTGACAAAACTCACACATGCCCACC |
| | | GTGCCCAGCACCTGAAGCTGCAGGGGGACCGTCAGTCT |
| | | TCCTCTTCCCCCCAAAACCCAAGGACACCCTCATGATCT |
| | | CCCGGACCCCTGAGGTCACATGCGTGGTGGTGGACGTG |
| | | AGCCACGAAGACCCTGAGGTCAAGTTCAACTGGTACGT |
| | | GGACGGCGTGGAGGTGCATAATGCCAAGACAAAGCCGC |
| | | GGGAGGAGCAGTACAACAGCACGTACCGTGTGGTCAGC |
| | | GTCCTCACCGTCCTGCACCAGGACTGGCTGAATGGCAAG |
| | | GAGTACAAGTGCAAGGTCTCCAACAAAGCCCTCGGCGC |
| | | CCCCATCGAGAAAACCATCTCCAAAGCCAAAGGGCAGC |
| | | CCCGAGAACCACAGGTGTACACCCTGCCCCCCTGCAGA |
| | | GATGAGCTGACCAAGAACCAGGTGTCCCTGTGGTGTCTG |
| | | GTCAAGGGCTTCTACCCCAGCGATATCGCCGTGGAGTGG |
| | | GAGAGCAACGGCCAGCCTGAGAACAACTACAAGACCAC |
| | | CCCCCCTGTGCTGGACAGCGACGGCAGCTTCTTCCTGTA |
| | | CTCCAAACTGACCGTGGACAAGAGCCGGTGGCAGCAGG |
| | | GCAACGTGTTCAGCTGCAGCGTGATGCACGAGGCCCTG |
| | | CACAACCACTACACCCAGAAGTCCCTGAGCCTGAGCCC |
| | | CGGCAGAGAGGGCCCTGAGCTGAGCCCTGATGATCCTG |
| | | CCGGACTGCTGGACCTGCGGCAGGGAATGTTTGCCCAG |
| | | CTGGTGGCCCAGAACGTGCTGCTGATCGATGGCCCCCTG |
| | | TCCTGGTACAGCGATCCTGGACTGGCTGGCGTGTCACTG |
| | | ACAGGCGGCCTGAGCTACAAAGAGGACACCAAAGAACT |
| | | GGTGGTGGCCAAGGCCGGCGTGTACTACGTGTTCTTTCA |
| | | GCTGGAACTGCGGAGAGTGGTGGCCGGCGAAGGATCTG |
| | | GCTCTGTGTCTCTGGCCCTGCATCTGCAGCCTCTGAGAT |
| | | CTGCTGCTGGCGCCGCTGCTCTGGCACTGACAGTGGATC |
| | | TGCCTCCTGCCAGCAGCGAGGCCCGGAATAGCGCATTTG |
| | | GGTTTCAAGGCAGGCTGCTGCACCTGTCTGCCGGCCAGA |
| | | GGCTGGGAGTGCATCTGCACACAGAGGCCAGGGCTAGA |
| | | CACGCCTGGCAGCTGACACAGGGCGCTACAGTGCTGGG |
| | | CCTGTTCAGAGTGACCCCCGAGATTCCAGCAGGCCTGGG |
| | | AGGCGGCGGATCTGGCGGCGGAGGATCTAGAGAAGGAC |
| | | CCGAGCTGTCCCCCGACGATCCCGCTGGGCTGCTGGATC |
| | | TGAGACAGGGCATGTTCGCTCAGCTGGTGGCTCAGAATG |
| | | TGCTGCTGATTGACGGACCTCTGAGCTGGTACTCCGACC |
| | | CAGGGCTGGCAGGGGTGTCCCTGACTGGGGGACTGTCCT |
| | | ACAAAGAAGATACAAAAGAACTGGTGGTGGCTAAAGCT |
| | | GGGGTGTACTATGTGTTTTTTCAGCTGGAACTGAGGCGG |
| | | GTGGTGGCTGGGGAGGGCTCAGGATCTGTGTCCCTGGCT |
| | | CTGCATCTGCAGCCACTGCGCTCTGCAGCAGGGGCTGCA |
| | | GCACTGGCCCTGACTGTGGACCTGCCCCCAGCTTCTTCC |
| | | GAGGCCAGAAACAGCGCCTTCGGGTTCCAAGGACGCCT |
| | | GCTGCATCTGAGCGCCGGACAGCGCCTGGGAGTGCATC |
| | | TGCATACTGAAGCCAGAGCCCGGCATGCTTGGCAGCTG |
| | | ACTCAGGGGGCAACTGTGCTGGGACTGTTTCGCGTGACA |
| | | CCTGAGATCCCAGCCGGGCTC |
| 124 | nucleotide | See Table 7 |
| | sequence of anti- | |
| | CD19(8B8-2B11) | |
| | light chain | |
| 109 | Fc hole | See Table 2 |
| | monomeric 4- | |
| | 1BB ligand (71- | |
| | 248) chain | |
| 128 | anti-CD19(8B8- | QVQLVQSGAEVKKPGASVKVSCKASGYTFTDYIMHWVRQ |
| | 2B11) Fc knob | APGQGLEWMGYINPYNDGSKYTEKFQGRVTMTSDTSISTA |
| | dimeric 4-1BB | YMELSRLRSDDTAVYYCARGTYYYGPQLFDYWGQGTTVT |
| | ligand (71-248) | VSSASTKGPSVFPLAPSSKSTSGGTAALGCLVKDYFPEPVT |
| | | VSWNSGALTSGVHTFPAVLQSSGLYSLSSVVTVPSSSLGTQ |
| | | TYICNVNHKPSNTKVDKKVEPKSCDKTHTCPPCPAPEAAG |
| | | GPSVFLFPPKPKDTLMISRTPEVTCVVVDVSHEDPEVKFNW |
| | | YVDGVEVHNAKTKPREEQYNSTYRVVSVLTVLHQDWLN |
| | | GKEYKCKVSNKALGAPIEKTISKAKGQPREPQVYTLPPCRD |
| | | ELTKNQVSLWCLVKGFYPSDIAVEWESNGQPENNYKTTPP |
| | | VLDSDGSFFLYSKLTVDKSRWQQGNVFSCSVMHEALHNH |
| | | YTQKSLSLSPGREGPELSPDDPAGLLDLRQGMFAQLVAQN |
| | | VLLIDGPLSWYSDPGLAGVSLTGGLSYKEDTKELVVAKAG |
| | | VYYVFFQLELRRVVAGEGSGSVSLALHLQPLRSAAGAAAL |
| | | ALTVDLPPASSEARNSAFGFQGRLLHLSAGQRLGVHLHTE |
| | | ARARHAWQLTQGATVLGLFRVTPEIPAGLGGGGSGGGGS |
| | | REGPELSPDDPAGLLDLRQGMFAQLVAQNVLLIDGPLSWY |
| | | SDPGLAGVSLTGGLSYKEDTKELVVAKAGVYYVFFQLELR |
| | | RVVAGEGSGSVSLALHLQPLRSAAGAAALALTVDLPPASS |
| | | EARNSAFGFQGRLLHLSAGQRLGVHLHTEARARHAWQLT |
| | | QGATVLGLFRVTPEIPAGL |
| 126 | anti-CD19(8B8- | See Table 7 |
| | 2B11) light chain | |

[0676] 1.3. Generation of Anti-CD19 Binders 8B8-018 and 8B8-2B11

[0677] 1.3.1 Generation of Anti-CD19 Clone 8B8-018

[0678] a) Immunization and Generation of Mouse Anti-Human CD19 Antibodies (Hybridomas)

[0679] Balb/c mice were immunized six times and boosted with CD19-transfected HEK293 cells (mean receptor density 35,000 per cell). The immune response was monitored by testing serum samples with a CD19-cell-ELISA on human CD19-transfected NIH-3T3 cells. Spleen cells from mice with sufficient titers of anti-human CD19 antibody were used for immortalization by fusion with mouse myeloma cell line P3X63 Ag8.653. Three fusions were carried out and hybridoma supernatants screened by cell-ELISA on human CD19-transfected NIH-3T3 cells and FACS binding assay using Daudi (CD19+) and CD19-cells for anti-human CD19 specific antibodies (see Example 1 of WO 2011/147834).

[0680] b) Hybridoma Screening and Cell Biological Functional Evaluation of Anti-CD19 Antibodies

[0681] A cell ELISA was applied for screening of hybridomas, and to identify those hybridomas that secrete antibodies against human-CD19. NIH3T3 cells transfected with human-CD19 were used as positive cells; non-transfected NIH3T3 cells were used as negative control cells. For the assessment of the positive hybridomas the OD ratio between transfected and non-transfected NIH3T3 cells was quantified.
[0682] Culture Medium: DMEM high glucose (4.5 mg/ml), 10% FCS, Na-Pyruvate, NEAA, Glutamine
[0683] Antibodies positive control: anti CD19 monoclonal antibody (IgG1) Pharmingen Cat #555409 c=1 mg/ml
[0684] Detection antibody: Goat anti-Mouse IgG (H+L) HRP Conjugate Bio-Rad Cat #170-06516
[0685] Dilution 1: 2000 in 1× ELISA Blocking Reagent
[0686] Other reagents: Fibronectin Roche Cat #838039 c=1 mg/ml
[0687] Glutardialdehyde: 25% stock solution//Grade Agar Scientific #R102 final concentration: 0.05% in PBS
[0688] ELISA Blocking Reagent: 10× stock solution//Roche Cat #1112589
[0689] TMB substrate: Roche Cat #11432559
[0690] Stop Solution: 1 M H2SO4
[0691] BioRad Cat #170-6516 Dilution 1: 2000 in 1× ELISA Blocking Reagent

### Day 1:

[0692] Fibronectin coating: 5 μg/cm² in PBS; 96well plate=32 cm²; 160 μg/plate in 6 ml
[0693] PBS, 50 μl/well
[0694] incubate 45 min at RT, aspirate coating solution
[0695] Seed 1.25×104 cells/well in 50 μl culture medium in a 96well plate
[0696] incubate 40 hours at 37° C.
[0697] add to upper half of the plate: NIH3T3 cells expressing CD19
[0698] add to lower half of the plate: non-transfected NIH3T3 cells

### Day 3:

[0699] Addition of positive control antibody or samples (supernatant or mouse serum) in 50 μl culture medium
[0700] incubate for 2 h at 4° C.
[0701] Remove medium, fix cells with 100 μl Glutardialdehyde (0.05% in PBS)
[0702] Wash two times with 200 μl PBS
[0703] Addition of detection antibody 1:2000, 50 μl/well
[0704] incubate 2 h at RT
[0705] wash three times with 200 μl PBS
[0706] add 50 μl TMB, incubate for 30 min. at RT,
[0707] stop by addition of 25 μl 1 M H2SO4; read extinction at 450nm/620nm
[0708] Calculation of results: ratio OD NIH3T3 CD19:OD NIH3T3 non-transfected

[0709] The selected antibody demonstrated specific binding to CD19 transfected NIH3T3 cells as compared to untransfected NIH3T3 cells (see Example 2 of WO 2011/147834).

[0710] c) Humanization of Anti-CD19 Antibody

[0711] The CD19 binding specificity of the murine antibody was transferred onto a human acceptor framework to eliminate potential immunogenicity issues arising from sequence stretches that the human body will recognize as foreign. This was done by engrafting the entire complementary determining regions (CDR) of the murine (donor) antibody onto a human (acceptor) antibody framework, and is called CDR-grafting or antibody humanization.

[0712] The murine amino acid sequence was aligned with a collection of human germ-line antibody V genes, and sorted according to sequence identity and homology. Before selecting one particular acceptor sequence, the so-called canonical loop structures of the donor antibody have to be determined (Morea, V., et al., Methods, Vol 20, Issue 3 (2000) 267-279). These canonical loop structures are determined by the type of residues present at the so-called canonical positions. These positions lie (partially) outside of the CDR regions, and have to be kept functionally equivalent in the final construct in order to retain the CDR conformation of the parental (donor) antibody. The human germ-line sequence VBASE_VH1_1 was chosen as the acceptor for the heavy chain and sequence VBASE_VK2_5 was chosen for the light chain.

[0713] It was found that the wild-type humanized anti-human CD19 antibody 8B8 has three deamidation hotspots in the HVR-L1: NSNGNT (SEQ ID NO: 129). Additionally it was found that in the HVR-H2 a further deamidation hotspot is present: KFNG (SEQ ID NO: 130). To address the deamidation hotspot in the HVR-H2 an N (Asn) to Q (Gln) point mutation at position 64 (numbering according to Kabat) has been introduced. To address the deamidation hotspots in the light chain and to obtain a humanized anti-human CD19 antibody with improved deamidation stability a single mutation at position 27e from S (serine) to P (proline) (numbering according to Kabat) was introduced. Thus, clone 8B8-018 with the CDRs as shown in Table 16 below was generated.

TABLE 9
Comparison of 8B8-018 with humanized
wild-type CD19 antibody 8B8

variant

| parameter | wt 8B8 | 8B8-018 |
|---|---|---|
| K_{D} (BIAcore) [nM] | 5 | 6 |
| t_{1/2} [min] | — | 43.6 |
| human CD19 binding after | 46 | 95 |
| pH 7.4 incubation [%] | | |
| human CD19 binding after | 90 | 99 |
| pH 6.0 incubation [%] | | |
| SEC main peak after | >95 | >95 |
| incubation [%] | | |

[0714] Additionally, 8B8-018 maintains the cross-reactivity to cynomolgus CD19 as shown in the following Table 10.

| EC50 [μg/ml] | wt 8B8 | 8B8-018 |
|---|---|---|
| huCD19 ECD | 0.087 | 0.084 |
| cyCD19 ECD | 0.313 | 0.255 |

[0715] 1.3.2 Preparation, Purification and Characterization of CD19 antigen Fc Fusion for Phage Display Campaign

[0716] In order to express and purify the human and cynomolgus CD19 ectodomain in a monomeric state (human CD19 see SEQ ID NO:64), the respective DNA fragment was fused to a human IgG1 Fc gene segment containing the “knob” mutations (human: SEQ ID NO: 132;

[0717] cynomolgus: SEQ ID NO: 135) and was transfected with an “Fc-hole” (SEQ ID NO: 131) counterpart (Merchant et al., 1998). An IgA cleavage site (PTPPTP) was introduced between the antigen ectodomain and the Fc knob chain. An Avi tag for directed biotinylation was introduced at the C-terminus of the antigen-Fc knob chain and mutations H435R and Y436F were introduced in the Fc hole for purification purposes (Jendeberg L. et al, J. Immunological methods, 1997). Combination of the antigen-Fc knob chain containing the S354C/T366W mutations (human: SEQ ID NO: 134; cynomolgus: SEQ ID NO: 136), with a Fc hole chain containing the Y349C/T366S/L368A/Y407V mutations (SEQ ID NO: 133) allows generation of a heterodimeric Fc fusion fragment which includes a single copy of the CD19 ectodomain (in analogy to the 4-1BB construct in FIG. 3C). Table 13 lists the cDNA and amino acid sequences of the antigen Fc-fusion construct.

TABLE 11
cDNA and Amino acid sequences of monomeric human and cynomolgus
CD19 antigen Fc(kih) fusion molecule

| SEQ ID NO: | Antigen | Sequence |
|---|---|---|
| 131 | Nucleotide | GACAAAACTCACACATGCCCACCGTGCCCAGCACCTGAAG |
| | sequence of | CTGCAGGGGGACCGTCAGTCTTCCTCTTCCCCCCAAAACCC |
| | Fc hole chain | AAGGACACCCTCATGATCTCCCGGACCCCTGAGGTCACATG |
| | with HYRF | CGTGGTGGTGGACGTGAGCCACGAAGACCCTGAGGTCAAG |
| | mutation | TTCAACTGGTACGTGGACGGCGTGGAGGTGCATAATGCCA |
| | | AGACAAAGCCGCGGGAGGAGCAGTACAACAGCACGTACC |
| | | GTGTGGTCAGCGTCCTCACCGTCCTGCACCAGGACTGGCTG |
| | | AATGGCAAGGAGTACAAGTGCAAGGTCTCCAACAAAGCCC |
| | | TCGGCGCCCCCATCGAGAAAACCATCTCCAAAGCCAAAGG |
| | | GCAGCCCCGAGAACCACAGGTGTGCACCCTGCCCCCATCC |
| | | CGGGATGAGCTGACCAAGAACCAGGTCAGCCTCTCGTGCG |
| | | CAGTCAAAGGCTTCTATCCCAGCGACATCGCCGTGGAGTG |
| | | GGAGAGCAATGGGCAGCCGGAGAACAACTACAAGACCAC |
| | | GCCTCCCGTGCTGGACTCCGACGGCTCCTTCTTCCTCGTGA |
| | | GCAAGCTCACCGTGGACAAGAGCAGGTGGCAGCAGGGGA |
| | | ACGTCTTCTCATGCTCCGTGATGCATGAGGCTCTGCACAAC |
| | | CGCTTCACGCAGAAGAGCCTCTCCCTGTCTCCGGGTAAA |
| 132 | Nucleotide | CCCGAGGAACCCCTGGTCGTGAAGGTGGAAGAGGGCGACA |
| | sequence of | ATGCCGTGCTGCAGTGCCTGAAGGGCACCTCCGATGGCCCT |
| | human CD19 | ACCCAGCAGCTGACCTGGTCCAGAGAGAGCCCCCTGAAGC |
| | antigen Fc | CCTTCCTGAAGCTGTCTCTGGGCCTGCCTGGCCTGGGCATC |
| | knob chain | CATATGAGGCCTCTGGCCATCTGGCTGTTCATCTTCAACGT |
| | avi tag | GTCCCAGCAGATGGGCGGCTTCTACCTGTGTCAGCCTGGCC |
| | | CCCCATCTGAGAAGGCTTGGCAGCCTGGCTGGACCGTGAA |
| | | CGTGGAAGGATCCGGCGAGCTGTTCCGGTGGAACGTGTCC |
| | | GATCTGGGCGGCCTGGGATGCGGCCTGAAGAACAGATCTA |
| | | GCGAGGGCCCCAGCAGCCCCAGCGGCAAACTGATGAGCCC |
| | | CAAGCTGTACGTGTGGGCCAAGGACAGACCCGAGATCTGG |
| | | GAGGGCGAGCCTCCTTGCCTGCCCCCTAGAGACAGCCTGA |
| | | ACCAGAGCCTGAGCCAGGACCTGACAATGGCCCCTGGCAG |
| | | CACACTGTGGCTGAGCTGTGGCGTGCCACCCGACTCTGTGT |
| | | CTAGAGGCCCTCTGAGCTGGACCCACGTGCACCCTAAGGG |
| | | CCCTAAGAGCCTGCTGAGCCTGGAACTGAAGGACGACAGG |
| | | CCCGCCAGAGATATGTGGGTCATGGAAACCGGCCTGCTGC |
| | | TGCCTAGAGCCACAGCCCAGGATGCCGGCAAGTACTACTG |
| | | CCACAGAGGCAACCTGACCATGAGCTTCCACCTGGAAATC |
| | | ACCGCCAGACCCGTGCTGTGGCACTGGCTGCTGAGAACAG |
| | | GCGGCTGGAAGGTCGACGCTAGCGGTGGTAGTCCGACACC |
| | | TCCGACACCCGGGGGTGGTTCTGCAGACAAAACTCACACA |
| | | TGCCCACCGTGCCCAGCACCTGAAGCCGCAGGGGGACCGT |
| | | CAGTCTTCCTCTTCCCCCCAAAACCCAAGGACACCCTCATG |
| | | ATCTCCCGGACCCCTGAGGTCACATGCGTGGTGGTGGACGT |
| | | GAGCCACGAAGACCCTGAGGTCAAGTTCAACTGGTACGTG |
| | | GACGGCGTGGAGGTGCATAATGCCAAGACAAAGCCGCGGG |
| | | AGGAGCAGTACAACAGCACGTACCGTGTGGTCAGCGTCCT |
| | | CACCGTCCTGCACCAGGACTGGCTGAATGGCAAGGAGTAC |
| | | AAGTGCAAGGTCTCCAACAAAGCCCTCGGAGCCCCCATCG |
| | | AGAAAACCATCTCCAAAGCCAAAGGGCAGCCCCGAGAACC |
| | | ACAGGTGTACACCCTGCCCCCATGCCGGGATGAGCTGACC |
| | | AAGAACCAGGTCAGCCTGTGGTGCCTGGTCAAAGGCTTCT |
| | | ATCCCAGCGACATCGCCGTGGAGTGGGAGAGCAATGGGCA |
| | | GCCGGAGAACAACTACAAGACCACGCCTCCCGTGCTGGAC |
| | | TCCGACGGCTCCTTCTTCCTCTACAGCAAGCTCACCGTGGA |
| | | CAAGAGCAGGTGGCAGCAGGGGAACGTCTTCTCATGCTCC |
| | | GTGATGCATGAGGCTCTGCACAACCACTACACGCAGAAGA |
| | | GCCTCTCCCTGTCTCCGGGTAAATCCGGAGGCCTGAACGAC |
| | | ATCTTCGAGGCCCAGAAGATTGAATGGCACGAG |
| 133 | Fc hole chain | DKTHTCPPCPAPEAAGGPSVFLFPPKPKDTLMISRTPEVTCVV |
| | with HYRF | VDVSHEDPEVKFNWYVDGVEVHNAKTKPREEQYNSTYRVVS |
| | mutation | VLTVLHQDWLNGKEYKCKVSNKALGAPIEKTISKAKGQPREP |
| | | QVCTLPPSRDELTKNQVSLSCAVKGFYPSDIAVEWESNGQPE |
| | | NNYKTTPPVLDSDGSFFLVSKLTVDKSRWQQGNVFSCSVMHE |
| | | ALHNRFTQKSLSLSPGK |
| 134 | human CD19 | PEEPLVVKVEEGDNAVLQCLKGTSDGPTQQLTWSRESPLKPF |
| | antigen Fc | LKLSLGLPGLGIHMRPLAIWLFIFNVSQQMGGFYLCQPGPPSE |
| | knob chain | KAWQPGWTVNVEGSGELFRWNVSDLGGLGCGLKNRSSEGPS |
| | avi tag | SPSGKLMSPKLYVWAKDRPEIWEGEPPCLPPRDSLNQSLSQDL |
| | | TMAPGSTLWLSCGVPPDSVSRGPLSWTHVHPKGPKSLLSLEL |
| | | KDDRPARDMWVMETGLLLPRATAQDAGKYYCHRGNLTMSF |
| | | HLEITARPVLWHWLLRTGGWKVDASGGSPTPPTPGGGSADK |
| | | THTCPPCPAPEAAGGPSVFLFPPKPKDTLMISRTPEVTCVVVD |
| | | VSHEDPEVKFNWYVDGVEVHNAKTKPREEQYNSTYRVVSVL |
| | | TVLHQDWLNGKEYKCKVSNKALGAPIEKTISKAKGQPREPQV |
| | | YTLPPCRDELTKNQVSLWCLVKGFYPSDIAVEWESNGQPENN |
| | | YKTTPPVLDSDGSFFLYSKLTVDKSRWQQGNVFSCSVMHEAL |
| | | HNHYTQKSLSLSPGKSGGLNDIFEAQKIEWHE |
| 135 | Nucleotide | CCCCAGGAACCCCTGGTCGTGAAGGTGGAAGAGGGCGACA |
| | sequence of | ATGCCGTGCTCCAGTGCCTGGAAGGCACCTCCGATGGCCCT |
| | cynomolgus | ACACAGCAGCTCGTGTGGTGCAGAGACAGCCCCTTCGAGC |
| | CD19 antigen | CCTTCCTGAACCTGTCTCTGGGCCTGCCTGGCATGGGCATC |
| | Fc knob | AGAATGGGCCCTCTGGGCATCTGGCTGCTGATCTTCAACGT |
| | chain avi tag | GTCCAACCAGACCGGCGGCTTCTACCTGTGTCAGCCTGGCC |
| | | TGCCAAGCGAGAAGGCTTGGCAGCCTGGATGGACCGTGTC |
| | | CGTGGAAGGATCTGGCGAGCTGTTCCGGTGGAACGTGTCC |
| | | GATCTGGGCGGCCTGGGATGCGGCCTGAAGAACAGAAGCA |
| | | GCGAGGGCCCTAGCAGCCCCAGCGGCAAGCTGAATAGCAG |
| | | CCAGCTGTACGTGTGGGCCAAGGACAGACCCGAGATGTGG |
| | | GAGGGCGAGCCTGTGTGTGGCCCCCCTAGAGATAGCCTGA |
| | | ACCAGAGCCTGAGCCAGGACCTGACAATGGCCCCTGGCAG |
| | | CACACTGTGGCTGAGCTGTGGCGTGCCACCCGACTCTGTGT |
| | | CCAGAGGCCCTCTGAGCTGGACACACGTGCGGCCAAAGGG |
| | | CCCTAAGAGCAGCCTGCTGAGCCTGGAACTGAAGGACGAC |
| | | CGGCCCGACCGGGATATGTGGGTGGTGGATACAGGCCTGC |
| | | TGCTGACCAGAGCCACAGCCCAGGATGCCGGCAAGTACTA |
| | | CTGCCACAGAGGCAACTGGACCAAGAGCTTTTACCTGGAA |
| | | ATCACCGCCAGACCCGCCCTGTGGCACTGGCTGCTGAGAAT |
| | | CGGAGGCTGGAAGGTCGACGCTAGCGGTGGTAGTCCGACA |
| | | CCTCCGACACCCGGGGGTGGTTCTGCAGACAAAACTCACA |
| | | CATGCCCACCGTGCCCAGCACCTGAAGCCGCAGGGGGACC |
| | | GTCAGTCTTCCTCTTCCCCCCAAAACCCAAGGACACCCTCA |
| | | TGATCTCCCGGACCCCTGAGGTCACATGCGTGGTGGTGGAC |
| | | GTGAGCCACGAAGACCCTGAGGTCAAGTTCAACTGGTACG |
| | | TGGACGGCGTGGAGGTGCATAATGCCAAGACAAAGCCGCG |
| | | GGAGGAGCAGTACAACAGCACGTACCGTGTGGTCAGCGTC |
| | | CTCACCGTCCTGCACCAGGACTGGCTGAATGGCAAGGAGT |
| | | ACAAGTGCAAGGTCTCCAACAAAGCCCTCGGAGCCCCCAT |
| | | CGAGAAAACCATCTCCAAAGCCAAAGGGCAGCCCCGAGAA |
| | | CCACAGGTGTACACCCTGCCCCCATGCCGGGATGAGCTGA |
| | | CCAAGAACCAGGTCAGCCTGTGGTGCCTGGTCAAAGGCTT |
| | | CTATCCCAGCGACATCGCCGTGGAGTGGGAGAGCAATGGG |
| | | CAGCCGGAGAACAACTACAAGACCACGCCTCCCGTGCTGG |
| | | ACTCCGACGGCTCCTTCTTCCTCTACAGCAAGCTCACCGTG |
| | | GACAAGAGCAGGTGGCAGCAGGGGAACGTCTTCTCATGCT |
| | | CCGTGATGCATGAGGCTCTGCACAACCACTACACGCAGAA |
| | | GAGCCTCTCCCTGTCTCCGGGTAAATCCGGAGGCCTGAACG |
| | | ACATCTTCGAGGCCCAGAAGATTGAATGGCACGAG |
| 136 | cynomolgus | PQEPLVVKVEEGDNAVLQCLEGTSDGPTQQLVWCRDSPFEPF |
| | CD19 antigen | LNLSLGLPGMGIRMGPLGIWLLIFNVSNQTGGFYLCQPGLPSE |
| | Fc knob | KAWQPGWTVSVEGSGELFRWNVSDLGGLGCGLKNRSSEGPS |
| | chain avi tag | SPSGKLNSSQLYVWAKDRPEMWEGEPVCGPPRDSLNQSLSQD |
| | | LTMAPGSTLWLSCGVPPDSVSRGPLSWTHVRPKGPKSSLLSLE |
| | | LKDDRPDRDMWVVDTGLLLTRATAQDAGKYYCHRGNWTKS |
| | | FYLEITARPALWHWLLRIGGWKVDASGGSPTPPTPGGGSADK |
| | | THTCPPCPAPEAAGGPSVFLFPPKPKDTLMISRTPEVTCVVVD |
| | | VSHEDPEVKFNWYVDGVEVHNAKTKPREEQYNSTYRVVSVL |
| | | TVLHQDWLNGKEYKCKVSNKALGAPIEKTISKAKGQPREPQV |
| | | YTLPPCRDELTKNQVSLWCLVKGFYPSDIAVEWESNGQPENN |
| | | YKTTPPVLDSDGSFFLYSKLTVDKSRWQQGNVFSCSVMHEAL |
| | | HNHYTQKSLSLSPGKSGGLNDIFEAQKIEWHE |

[0718] For the production of the monomeric antigen/Fc fusion molecules, exponentially growing suspension CHO cells were co-transfected with two plasmids encoding the two components of fusion protein (knob and hole chains) using standard methods.

[0719] Secreted protein was purified from cell culture supernatant by affinity chromatography using Protein A, followed by size exclusion chromatography. For affinity chromatography, the supernatant was loaded on a MabSelect Sure column volume (CV)=5-15 mL, resin from GE Healthcare) equilibrated with Sodium Phosphate (20 mM), Sodium Citrate (20 mM), 0.5M sodium chloride buffer (pH 7.5). Unbound protein was removed by washing with at least 6 column volumes of the same buffer. The bound protein was eluted using a linear gradient; step 1, 10 CV from 0 to 60% elution buffer (20 mM sodium citrate, 500 mM Sodium chloride buffer (pH 2.5)); step 2, 2 CV from 60 to 100% elution buffer. For the linear gradient an additional 2 column volumes step elution with 100% elution buffer was applied.

[0720] The pH of collected fractions was adjusted by adding 1/40 (v/v) of 2M Tris, pH8.0. The protein was concentrated and filtered prior to loading on a HiLoad Superdex 200 column (GE Healthcare) equilibrated with 2 mM MOPS, 150 mM sodium chloride, 0.02% (w/v) sodium azide solution of pH 7.4.

[0721] Table 12 summarizes the yield and final monomer content of monomeric human and cynomolgus CD19 antigen Fc(kih) fusion protein.

TABLE 12
Biochemical analysis of monomeric human and cynomolgus
CD19 antigen Fc(kih) fusion protein

| | Monomer [%] | Yield |
|---|---|---|
| Construct | (SEC) | [mg/l] |
| monomeric human CD19 Fc(kih) fusion protein | 91 | 0.2 |
| monomeric cynomolgus CD19 Fc(kih) fusion | 95 | 3.56 |
| protein | | |

[0722] Part of the purified antigen was in vitro biotinylated using the BirA biotin-protein ligase standard reaction kit (Avidity, Cat. #BirA500) according to the manufacturer's instructions. The biotinylation degree for the human CD19-containing fusion was 94%, for the respective cynomolgus CD19 construct 100%. The biotinylated protein was then used for selection, screening and characterization of affinity-matured 8B8-derived clones devoid of the de-amidation hotspots N27d and N28. Two phage display libraries were generated in which a) both asparagine residues at positions 27d and 28 were eliminated and b) additional CDRs of heavy and light chain were randomized in order to select for 8B8 variants with an improved affinity.

[0723] 1.3.3 Generation of 8B8 Affinity Maturation Libraries Devoid of CDR-L1 Hotspots

[0724] Generation of affinity-matured 8B8-derived antibodies without the de-amidation sites N27d and N28, located in CDR-L1, was carried out by phage display using standard protocols (Silacci et al, 2005). In a first step, the VL and VH DNA sequences of the humanized parental clone 8B8 (SEQ ID NO: 137 and SEQ ID NO: 138) were cloned into a phagemid which was then used as a template for randomization. In a next step, two libraries were generated for the selection of favourable clones by phage display. In order to eliminate the above-mentioned hotspot positions, a LCDR1 randomization primer (SEQ ID NO: 139) that only allowed amino acids S T Q E at positions 27d and 28 was used for both libraries. Maturation library 1 was randomized in CDR1 and 2 of both the light and the heavy chain, while maturation library 2 was randomized in CDR1 and 3 of the light chain and in CDR3 of the heavy chain. For the generation of the maturation library 1, randomized in CDR1 and 2 of both the light and the heavy chain, three fragments were assembled by “splicing by overlapping extension” (SOE) PCR and cloned into the phage vector. The following primer combinations were used to generate the library fragments: fragment 1 (LMB3 (SEQ ID NO: 144) and CD19 L1 reverse random (SEQ ID NO: 139), fragment 2 (CD19 L2 forward random (SEQ ID NO: 140) and CD19 H1 reverse random (SEQ ID NO: 141), and fragment 3 (CD19 H2 forward random (SEQ ID NO: 142) and CD19 H3 reverse constant (SEQ ID NO: 143) (Table 13). After assembly of sufficient amounts of full length randomized fragment, it was digested with NcoI/NheI alongside with identically treated acceptor phagemid vector. A 3-fold molar excess of library insert was ligated with 10 μg of phagemid vector. Purified ligations were used for 20 transformations resulting in 2×10 exp9 transformants. Phagemid particles displaying the 8B8 affinity maturation library were rescued and purified by PEG/NaCl purification to be used for selections.

[0725] The generation of the second library, randomized in CDR1 and 3 of the light chain and in CDR3 of the heavy chain, was done similarly. The following primer combinations were used to generate the library fragments: fragment 1 (LMB3 (SEQ ID NO: 144) and CD19 L1 reverse random (SEQ ID NO: 139), fragment 2 (CD19 L1 forward constant (SEQ ID NO 145) and CD19 L3 reverse random (SEQ ID NO: 146, and fragment 3 (CD19 L3 forward constant (SEQ ID NO: 147) and CD19 H3 reverse random (SEQ ID NO: 148) (Table 14). After assembly of sufficient amounts of full length randomized fragment, it was digested with NcoI/KpnI alongside with identically treated acceptor phagemid vector. A 3-fold molar excess of library insert was ligated with 20ug of phagemid vector. Purified ligations were used for 40 transformations resulting in 2×10 exp9 transformants. Phagemid particles displaying the 8B8 affinity maturation library were rescued and purified by PEG/NaCl purification to be used for selections.

TABLE 13
Primers for 8B8 affinity maturation and hotspot removal library
L1_L2/H1_H2

| SEQ ID | Name | Sequence |
|---|---|---|
| 139 | CD19 L1 | CAG CTG CGG GCT CTG ACC CGG TTT CTG GAG ATA |
| | reverse | CCA GTT CAG 1 CGT 2 GCC 3 GGA 4 TTC CAG AGA TTG |
| | random | GCT GGA TTT GCA AGA AAT G |
| | | 1: 40% Y, 6% A/S/T/G/P/D/N/E/Q/V, 2: 40% N, 6% |
| | | A/S/T/Y/G/P/D/E/Q/V, 3: 25% S/T/Q/E, 4: 25% S/T/Q/E |
| 140 | CD19 L2 | CTC CAG AAA CCG GGT CAG AGC CCG CAG CTG CTG |
| | forward | ATC TAC 5 GTA TCT 6 CGC 7 8 GGC GTT 9 GAT CGT TTC |
| | random | AGC GGT TCT GGA TCC GGC ACC |
| | | 5: 30% R, 20% E, 5% A/S/T/Y/G/P/D/N/Q/V. 6: 30% K, 20% |
| | | S, 5% A/N/T/Y/G/P/D/E/Q/V, 7: 40% F, 5% |
| | | A/S/T/Y/G/P/D/E/Q/V/I/L, 8: 40% S, 6.6% |
| | | A/T/Y/G/P/D/E/Q/V, 9: 50% P, 50% L |
| 141 | CD19 H1 | CAT CCA CTC CAG ACC CTG GCC CGG GGC CTG ACG |
| | reverse | AAC CCA 10 CAT 11 12 13 14 GAA 15 GTA ACC AGA TGC |
| | random | TTT GCA GCT CAC TTT AAC GGA AGC |
| | | 10: 52% H, 4% G/A/S/P/T/N/Y/D/E/Q/V/I, 11: 30% I, 15% Y, |
| | | 5% G/A/S/T/P/N/H/D/E/Q/V, 12: 52% Y, 4% |
| | | G/A/S/P/T/N/H/D/E/Q/V/I, 13: 30% D, 15% G, 5% |
| | | A/S/P/Y/N/H/D/E/Q/V/I, 14: 52% T, 4% |
| | | G/A/S/P/Y/N/H/D/E/Q/V/I, 15: 52% T, 4% |
| | | G/A/S/P/Y/N/H/D/E/Q/V/I |
| 142 | CD19 H2 | CAG GCC CCG GGC CAG GGT CTG GAG TGG ATG GGC |
| | forward | 16 ATT 17 CCA 18 19 20 21 TCC 22 TAT ACC 23 AAA TTC |
| | random | CAG GGC CGC GTC ACG ATG ACC |
| | | 16: 45% Y, 5% A/S/P/T/N/H/D/E/Q/V/I, 17: 52% N, 4% |
| | | G/A/S/P/Y/T/H/D/E/Q/V/I, 18: 40% Y, 5% |
| | | G/A/S/P/T/N/H/D/E/Q/V/I, 19: 30% N, 15% S, 5% |
| | | G/A/T/P/Y/H/D/E/Q/V/I, 20: 30% D, 15% G, 5% |
| | | A/S/T/P/Y/N/H/E/Q/V/I, 21: 52% G, 4% |
| | | N/A/S/P/Y/T/H/D/E/Q/V/I, 22: 30% K, 15% N, 4% |
| | | G/A/S/P/Y/T/H/D/E/Q/V/I, 23: 30% E, 15% Q, 5% |
| | | G/A/S/T/P/Y/N/H/D/V/I |
| 143 | CD19 H3 | CGTCACCGGTTCGGGGAAGTAGTCCTTGACCAG |
| | reverse | |
| | constant | |
| 144 | LMB3 | CAGGAAACAGCTATGACCATGATTAC |

TABLE 14
Primers for 8B8 affinity maturation and hotspot removal library
L1_L3/H3

| SEQ ID | Name | Sequence |
|---|---|---|
| 145 | CD19 L1 | TGGTATCTCCAGAAACCGGGTCAGAGCCCGCAG |
| | forward | |
| | constant | |
| 139 | CD19 L1 | See Table 15 |
| | reverse | |
| | random | |
| 146 | CD19 L3 | TTT AAT TTC CAG TTT AGT TCC TTG ACC GAA GGT 24 |
| | reverse | 25 26 27 28 29 CTG CAG ACA ATA GTA GAC GCC AAC |
| | random | GTC TTC AGC |
| | | 24: 52% Y, 4% G/A/S/T/N/P/D/E/Q/V/L/I, 25: 52% P, 4% |
| | | G/A/S/T/Y/N/H/D/E/Q/V/I, 26: 42% V, 10% L, 4% |
| | | G/A/S/T/Y/N/P/D/E/Q/V/I, 27: 52% H, 4% |
| | | G/A/S/T/Y/N/P/D/E/Q/V/I, 28: 42% T, 10% I, 4% |
| | | G/A/S/T/Y/N/P/D/E/Q/V/L, 29: 45% L, 11% G, 4% |
| | | A/S/T/Y/N/P/D/E/Q/V/I |
| 147 | CD19 L3 | ACCTTCGGTCAAGGAACTAAACTGGAAATTAAACG |
| | forward | |
| | constant | |
| 148 | CD19 H3 | TT GGT GCT AGC AGA GCT TAC GGT CAC CGT GGT |
| | reverse | ACC TTG GCC CCA GTA ATC AAA 30 31 32 33 34 35 36 37 |
| | random | 38 GCG TGC ACA ATA GTA AAC AGC GGT GTC |
| | | 30: 50% L, 3.8% G/A/S/T/P/H/Y/N/D/E/Q/V/I, 31: 50% A, |
| | | 4.2% G/S/T/P/H/Y/N/D/E/Q/V/I, 32: 50% S, 4.2% |
| | | G/A/T/P/H/Y/N/D/E/Q/V/I, 33: 50% G, 4.2% |
| | | S/A/T/P/H/Y/N/D/E/Q/V/I, 34: 50% Y, 4.2% |
| | | G/A/T/P/H/S/N/D/E/Q/V/I, 35: 50% Y, 4.2% |
| | | G/A/T/P/H/S/N/D/E/Q/V/I, 36: 50% Y, 4.2% |
| | | G/A/T/P/H/S/N/D/E/Q/V/I, 37: 50% T, 4.2% |
| | | G/A/Y/P/H/S/N/D/E/Q/V/I, 38: 50% G, 4.2% |
| | | Y/A/T/P/H/S/N/D/E/Q/V/I |
| 144 | LMB3 | See Table 15 |

[0726] 1.3.4 Selection of Affinity Matured 8B8-Derived Clones Devoid of CDR-L1 Hotspots N27d and N28

[0727] For the selection of affinity-matured clones devoid of the CDR-Llhotspots N27d and N28, two selection approaches by phage display were performed:

[0728] In the first approach, the selection was executed on human CD19-Fc fusion protein using both phage display libraries. Panning rounds were performed in solution according to the following pattern: 1. binding of ˜10¹² phagemid particles to 30 nM biotinylated CD19-Fc protein for 0.5 h in a total volume of 1 ml, 2. capture of biotinylated CD19-Fc protein and specifically bound phage particles by addition of 5.4×10⁷ streptavidin-coated magnetic beads for 10 min, 3. washing of beads using 5×1 ml PBS/Tween20 and 5×1 ml PBS, 4. elution of phage particles by addition of 1 ml 100mM TEA for 10 min and neutralization by adding 500 ul M Tris/HCl pH 7.4, 5. re-infection of exponentially growing E. coli TG1 bacteria, and 6.infection with helperphage VCSM13 and subsequent PEG/NaCl precipitation of phagemid particles to be used in subsequent selection rounds. Selections were carried out over 3 rounds using decreasing antigen concentrations (30×10⁻⁹M, 10×10⁻⁹M, and 3×10⁻⁹M). In round 2 and 3, capture of antigen:phage complexes was performed using neutravidin plates instead of streptavidin beads. Neutravidin plates were washed with 5× PBS/Tween20 and 5× PBS. In round 3, the neutravidin plate was incubated overnight in 2 liters PBS for an “off-rate” selection before phage was eluted from the plate. Furthermore, cynomolgus CD19-Fc protein was used in round 2 in order to enrich cross-reactive binders.

[0729] In the second selection approach, the phage panning was executed on cells transiently expressing either the human or cynomolgus CD19 ECD on the cell surface. For the transient transfection of HEK cells, expression plasmids were generated that harbor the DNA sequences (from 5′ to 3′) for the following protein segments: A Flag tag, a SNAP tag, the CD19 ECD of either human or cynomolgus origin, and the transmembrane region of the Platelet-derived growth factor receptor (PDGFR) (SEQ ID NOs: 149 and 150). The expression of the respective proteins (SEQ ID NOs: 151 and 152) on the cell surface was confirmed by flow cytometry using an anti-Flag antibody for detection. Both libraries were exposed in the first selection round to cells either expressing the human or cynomolgus CD19 ECD-containing protein fusion. For the subsequent panning rounds, the species of the CD19 ECD was alternated accordingly. Cells transiently transfected with an irrelevant membrane protein were used for pre-clearing.

[0730] Panning rounds were performed according to the following pattern:
[0731] 1. Transfection of HEK cells with constructs expressing either CD19 ECD or an irrelevant transmembrane protein according to the standard procedure described before,
[0732] 2. Incubation of the cells for total 48 h at 37° C. in an incubator with a 5% CO₂ atmosphere,
[0733] 3. Isolation of cells by centrifugation (3 min at 250×g) and re-suspension of 1×10E7 CD19 ECD-positive cells and 1×10E7 negative cells in PBS/5% BSA, respectively,
[0734] 4. Pre-clearing of unspecific phage by incubating the phage library with 1×107 CD19-negative cells for 60 min at 4° C. using a gently rotating tube rotator,
[0735] 5. Centrifugation of cells at 250×g for 3 min and transfer of supernatant into a fresh tube and addition of 1×10E7 CD19-positive cells and incubation for 60 min at 4° C. by gentle rotation on a tube rotator,
[0736] 6. Washing of cells by centrifugation for 1 min at 250×g, aspiration of the supernatant, and re-suspension in 1 ml PBS (8 times),
[0737] 7. Phage elution with 1 ml 100 mM TEA, incubation for 5 min at RT, and neutralization of the eluate with 500 ul 1M Tris-HCl, pH7.6,
[0738] 8. re-infection of exponentially growing E. coli TG1 bacteria, and
[0739] 9. infection with helperphage VCSM13 and subsequent PEG/NaCl precipitation of phagemid particles to be used in subsequent selection rounds. Selections were carried out over 3 rounds.

[0740] For both selection approaches, specific binders were identified by ELISA as follows: 100 ul of 30 nM biotinylated CD19-Fc protein per well were coated on neutravidin plates. Fab-containing bacterial supernatants were added and binding Fabs were detected via their Flag-tags using an anti-Flag/HRP secondary antibody.

[0741] Clones that were ELISA-positive on recombinant human CD19 were further tested in a cell-based ELISA using cells that were transiently transfected with the human CD19 ECD-containing expression plasmid (SEQ ID NO: 149). This analysis was performed as follows: 48 h after transfection, HEK cells were harvested and centrifuged at 250×g for 5 min. Cells were then re suspended in ice-cold PBS BSA 2% to 4×10⁶ cells/ml and incubated for 20 min on ice to block unspecific binding sites. 4 ×10⁵cells in 100 ul were distributed to each well of a 96 well plate and centrifuged at 250×g and 4° C. for 3 min. Supernatant was aspirated off and 50 ul bacterial supernatant containing soluble Fab fragments was diluted with 50 ul ice-cold PBS/BSA 2%, added to the plate, mixed with the cells and incubated for 1 h at 4° C. Afterwards, cells were washed 3 times with ice cold PBS before 100 ul PBS BSA 2% per well containing a 1:2000 dilution of anti-Fab-HRP antibody were added. After an incubation time of 1 h, cells were washed again 3 times with ice-cold PBS. For the development, 100 ul “1-step ultra TMB-ELISA” substrate was added per well. After an incubation time of 10 minutes, supernatant was transferred to a new 96-well plate containing 40 ul H₂SO₄ 1M per well and absorbance was measured 450 nM. Clones exhibiting significant signals over background were subjected to a kinetic screening experiment by SPR-analysis using ProteOn XPR36.

[0742] 1.3.5 Identification of Affinity-Matured 8B8-Derived Variants by SPR

[0743] In order to further characterize the ELISA-positive clones, the off-rate was measured by surface plasmon resonance and compared with the parental humanized clone 8B8.

[0744] For this experiment, 7000 RU of polyclonal anti-human Fab antibody were immobilized on all 6 channels of a GLM chip by Amine coupling (NaAcetate pH4.5, 25 μl/min, 240 s) (vertical orientation). Each antibody-containing bacterial supernatant was filtered and 2-fold diluted with PBS, and then injected for 360 s at 25 μl/minute to achieve immobilization levels of between 100 and 400 response units (RU) in vertical orientation. Injection of monomeric CD19-Fc: For one-shot kinetics measurements, injection direction was changed to horizontal orientation, three-fold dilution series of purified monomeric CD19-Fc (varying concentration ranges between 150 and 6 nM) were injected simultaneously at 50 μl/min along separate channels 1-4, with association times of 180 s, and dissociation times of 300 s. A human IgG Fc fragment (150nM) was injected in channel 5 as a negative control for specific binding to the affinity matured CD19 variants along with a PBS injection in the 6th channel to provide an “in-line” blank for referencing. Regeneration was performed by two pulses of 10 mM glycine pH 1.5 and 50 mM NaOH for 30 s at 90 ul/min (horizontal orientation). Dissociation rate constants (k_{off}) were calculated using a simple one-to-one Langmuir binding model in ProteOn Manager v3.1 software by simultaneously fitting the sensorgrams. Clones expressing Fabs with the slowest dissociation rate constants were identified. The variable domains of the corresponding phagemids were sequenced. Importantly, both asparagine residue in CDR-L1 (position 27d and 28) were replaced by a serine or a threonine, demonstrating that both de-amidation sites were removed.

TABLE 15
Dissociation constants of parental 8B8 and selected clone 2B11
obtained in screening analysis with bacterial supernatant

| clone | Dissociation constant kd (1/s) |
|---|---|
| Parental 8B8 | 3.01E−4 |
| 2B11 | 4.37E−6 |

[0745] Table 16 shows the amino acid sequences of the CDRs and variable regions VH and VL of clones 8B8-018 and 8B8-2B11, respectively.

TABLE 16
Sequences of of the CDRs and variable regions VH and VL of
clones 8B8-018 and 8B8-2B11

| SEQ | | |
|---|---|---|
| ID NO: | Description | Sequence |
| 29 | CD19 (8B8-018) CDR-H1 | DYIMH |
| 30 | CD19 (8B8-018) CDR-H2 | YINPYNDGSKYTEKFQG |
| 31 | CD19 (8B8-018) CDR-H3 | GTYYYGSALFDY |
| 32 | CD19 (8B8-018) CDR-L1 | KSSQSLENPNGNTYLN |
| 33 | CD19 (8B8-018) CDR-L2 | RVSKRFS |
| 34 | CD19 (8B8-018) CDR-L3 | LQLTHVPYT |
| 41 | CD19 (8B8-018) VH | QVQLVQSGAEVKKPGASVKVSCKASGYTFTDYIMH |
| | | WVRQAPGQGLEWMGYINPYNDGSKYTEKFQGRVT |
| | | MTSDTSISTAYMELSRLRSDDTAVYYCARGTYYYGS |
| | | ALFDYWGQGTTVTVSS |
| 42 | CD19 (8B8-018) VL | DIVMTQTPLSLSVTPGQPASISCKSSQSLENPNGNTYL |
| | | NWYLQKPGQSPQLLIYRVSKRFSGVPDRFSGSGSGTD |
| | | FTLKISRVEAEDVGVYYCLQLTHVPYTFGQGTKLEIK |
| 35 | CD19 (8B8-2B11) CDR-H1 | DYIMH |
| 36 | CD19 (8B8-2B11) CDR-H2 | YINPYNDGSKYTEKFQG |
| 37 | CD19 (8B8-2B11) CDR-H3 | GTYYYGPQLFDY |
| 38 | CD19 (8B8-2B11) CDR-L1 | KSSQSLETSTGTTYLN |
| 39 | CD19 (8B8-2B11) CDR-L2 | RVSKRFS |
| 40 | CD19 (8B8-2B11) CDR-L3 | LQLLEDPYT |
| 43 | CD19 (8B8-2B11) VH | QVQLVQSGAEVKKPGASVKVSCKASGYTFTDYIMH |
| | | WVRQAPGQGLEWMGYINPYNDGSKYTEKFQGRVT |
| | | MTSDTSISTAYMELSRLRSDDTAVYYCARGTYYYGP |
| | | QLFDYWGQGTTVTVSS |
| 44 | CD19 (8B8-2B11) VL | DIVMTQTPLSLSVTPGQPASISCKSSQSLETSTGTTYL |
| | | NWYLQKPGQSPQLLIYRVSKRFSGVPDRFSGSGSGTD |
| | | FTLKISRVEAEDVGVYYCLQLLEDPYTFGQGTKLEIK |

[0746] 1.4 Preparation of Monovalent CEA-Targeted 4-1BB Ligand Trimer-Containing Fc (kih) Fusion Antigen Binding Molecule, wherein the 4-1BB Ligands are C-Terminally Fused (Constructs 5.11 and 5.12) (CEA on the Knob Chain)

[0747] The molecule was prepared as described in Example 1.1 for the monovalent FAP targeted construct, with the only difference that the anti-FAP binder was replaced by an anti-CEA binder.

[0748] The variable region of heavy and light chain DNA sequences encoding binder specific for carcinoembryonic antigen (CEA), clone T84.66-LCHA, were subcloned in frame with either the constant heavy chain of the knob or the constant light chain of human IgG1. The generation of the CEA clone is described in Example 1.5.

[0749] The Pro329Gly, Leu234Ala and Leu235Ala mutations have been introduced in the constant region of the knob and hole heavy chains to abrogate binding to Fc gamma receptors according to the method described in International Patent Appl. Publ. No. WO 2012/130831 A1.

[0750] For all constructs the knobs into holes heterodimerization technology was used as described in Carter, J Immunol Methods 248, 7-15 (2001). Combination of the hulgG1 Fc hole chain containing the Y349C/T366S/L368A/Y407V mutations in the CH3 domain, the anti-FAP huIgG1 knob chain containing the S354C/T366W mutations in the CH3 domain and the anti-FAP light chain allows generation of a heterodimer, which includes an assembled trimeric 4-1BB ligand and one CEA binding Fab (FIGS. 2A and 2B).

[0751] Table 17 shows the cDNA and amino acid sequences of the monovalent CEA(T84.66-LCHA)-targeted 4-1BB ligand (71-248) trimer-containing Fc (kih) fusion antigen binding molecule (Construct 5.11).

TABLE 17
Sequences of CEA(T84.66-LCHA)-targeted human 4-1BB ligand trimer
containing Fc (kih) fusion molecule Construct 5.11

| SEQ ID | | |
|---|---|---|
| NO: | Description | Sequence |
| 101 | nucleotide | see Table 1 |
| | sequence of Fc | |
| | hole dimeric 4- | |
| | 1BB ligand (71- | |
| | 248) chain | |
| 153 | nucleotide | CAGGTGCAGCTGGTGCAGTCTGGCGCCGAAGTGAAGAA |
| | sequence of anti- | ACCCGGCAGCAGCGTGAAGGTGTCCTGCAAGGCCAGCG |
| | CEA(T84.66- | GCTTCAACATCAAGGACACCTACATGCACTGGGTGCGCC |
| | LCHA) Fc knob | AGGCCCCTGGACAGGGACTGGAATGGATGGGCAGAATC |
| | monomeric 4- | GACCCCGCCAACGGCAACAGCAAATACGTGCCCAAGTT |
| | 1BB (71-248) | CCAGGGCAGAGTGACCATCACCGCCGACACCAGCACCT |
| | ligand | CCACCGCCTACATGGAACTGAGCAGCCTGCGGAGCGAG |
| | | GACACCGCCGTGTACTACTGTGCCCCCTTCGGCTACTAC |
| | | GTGTCCGACTACGCCATGGCCTATTGGGGCCAGGGCAC |
| | | ACTCGTGACCGTGTCCTCTGCTAGCACCAAGGGCCCATC |
| | | GGTCTTCCCCCTGGCACCCTCCTCCAAGAGCACCTCTGG |
| | | GGGCACAGCGGCCCTGGGCTGCCTGGTCAAGGACTACT |
| | | TCCCCGAACCGGTGACGGTGTCGTGGAACTCAGGCGCC |
| | | CTGACCAGCGGCGTGCACACCTTCCCGGCTGTCCTACAG |
| | | TCCTCAGGACTCTACTCCCTCAGCAGCGTGGTGACCGTG |
| | | CCCTCCAGCAGCTTGGGCACCCAGACCTACATCTGCAAC |
| | | GTGAATCACAAGCCCAGCAACACCAAGGTGGACAAGAA |
| | | AGTTGAGCCCAAATCTTGTGACAAAACTCACACATGCCC |
| | | ACCGTGCCCAGCACCTGAAGCTGCAGGGGGACCGTCAG |
| | | TCTTCCTCTTCCCCCCAAAACCCAAGGACACCCTCATGA |
| | | TCTCCCGGACCCCTGAGGTCACATGCGTGGTGGTGGACG |
| | | TGAGCCACGAAGACCCTGAGGTCAAGTTCAACTGGTAC |
| | | GTGGACGGCGTGGAGGTGCATAATGCCAAGACAAAGCC |
| | | GCGGGAGGAGCAGTACAACAGCACGTACCGTGTGGTCA |
| | | GCGTCCTCACCGTCCTGCACCAGGACTGGCTGAATGGCA |
| | | AGGAGTACAAGTGCAAGGTCTCCAACAAAGCCCTCGGC |
| | | GCCCCCATCGAGAAAACCATCTCCAAAGCCAAAGGGCA |
| | | GCCCCGAGAACCACAGGTGTACACCCTGCCCCCCTGCA |
| | | GAGATGAGCTGACCAAGAACCAGGTGTCCCTGTGGTGT |
| | | CTGGTCAAGGGCTTCTACCCCAGCGATATCGCCGTGGAG |
| | | TGGGAGAGCAACGGCCAGCCTGAGAACAACTACAAGAC |
| | | CACCCCCCCTGTGCTGGACAGCGACGGCAGCTTCTTCCT |
| | | GTACTCCAAACTGACCGTGGACAAGAGCCGGTGGCAGC |
| | | AGGGCAACGTGTTCAGCTGCAGCGTGATGCACGAGGCC |
| | | CTGCACAACCACTACACCCAGAAGTCCCTGAGCCTGAG |
| | | CCCCGGCGGAGGCGGCGGAAGCGGAGGAGGAGGATCC |
| | | AGAGAGGGCCCTGAGCTGAGCCCTGATGATCCTGCCGG |
| | | ACTGCTGGACCTGCGGCAGGGAATGTTTGCCCAGCTGGT |
| | | GGCCCAGAACGTGCTGCTGATCGATGGCCCCCTGTCCTG |
| | | GTACAGCGATCCTGGACTGGCTGGCGTGTCACTGACAGG |
| | | CGGCCTGAGCTACAAAGAGGACACCAAAGAACTGGTGG |
| | | TGGCCAAGGCCGGCGTGTACTACGTGTTCTTTCAGCTGG |
| | | AACTGCGGAGAGTGGTGGCCGGCGAAGGATCTGGCTCT |
| | | GTGTCTCTGGCCCTGCATCTGCAGCCTCTGAGATCTGCT |
| | | GCTGGCGCCGCTGCTCTGGCACTGACAGTGGATCTGCCT |
| | | CCTGCCAGCAGCGAGGCCCGGAATAGCGCATTTGGGTTT |
| | | CAAGGCAGGCTGCTGCACCTGTCTGCCGGCCAGAGGCT |
| | | GGGAGTGCATCTGCACACAGAGGCCAGGGCTAGACACG |
| | | CCTGGCAGCTGACACAGGGCGCTACAGTGCTGGGCCTG |
| | | TTCAGAGTGACCCCCGAGATTCCTGCCGGGCTC |
| 154 | nucleotide | GAGATCGTGCTGACCCAGAGCCCTGCCACCCTGTCACTG |
| | sequence of anti- | TCTCCAGGCGAGAGAGCCACCCTGAGCTGTAGAGCCGG |
| | CEA(T84.66- | CGAGAGCGTGGACATCTTCGGCGTGGGATTTCTGCACTG |
| | LCHA) light | GTATCAGCAGAAGCCCGGCCAGGCCCCCAGACTGCTGA |
| | chain | TCTACAGAGCCAGCAACCGGGCCACAGGCATCCCCGCC |
| | | AGATTTTCTGGCTCTGGCAGCGGCACCGACTTCACCCTG |
| | | ACAATCAGCAGCCTGGAACCCGAGGACTTCGCCGTGTA |
| | | CTACTGCCAGCAGACCAACGAGGACCCCTACACCTTTGG |
| | | CCAGGGCACCAAGCTGGAAATCAAGCGTACGGTGGCTG |
| | | CACCATCTGTCTTCATCTTCCCGCCATCTGATGAGCAGTT |
| | | GAAATCTGGAACTGCCTCTGTTGTGTGCCTGCTGAATAA |
| | | CTTCTATCCCAGAGAGGCCAAAGTACAGTGGAAGGTGG |
| | | ATAACGCCCTCCAATCGGGTAACTCCCAGGAGAGTGTC |
| | | ACAGAGCAGGACAGCAAGGACAGCACCTACAGCCTCAG |
| | | CAGCACCCTGACGCTGAGCAAAGCAGACTACGAGAAAC |
| | | ACAAAGTCTACGCCTGCGAAGTCACCCATCAGGGCCTG |
| | | AGCTCGCCCGTCACAAAGAGCTTCAACAGGGGAGAGTGT |
| 104 | Fc hole dimeric 4- | see Table 1 |
| | 1BB (71-248) | |
| | ligand chain | |
| 155 | anti-CEA | QVQLVQSGAEVKKPGSSVKVSCKASGFNIKDTYMHWVRQ |
| | (T84.66-LCHA) | APGQGLEWMGRIDPANGNSKYVPKFQGRVTITADTSTSTA |
| | Fc knob | YMELSSLRSEDTAVYYCAPFGYYVSDYAMAYWGQGTLV |
| | monomeric 4-1- | TVSSASTKGPSVFPLAPSSKSTSGGTAALGCLVKDYFPEPV |
| | BB (71-248) | TVSWNSGALTSGVHTFPAVLQSSGLYSLSSVVTVPSSSLGT |
| | ligand | QTYICNVNHKPSNTKVDKKVEPKSCDKTHTCPPCPAPEAA |
| | | GGPSVFLFPPKPKDTLMISRTPEVTCVVVDVSHEDPEVKFN |
| | | WYVDGVEVHNAKTKPREEQYNSTYRVVSVLTVLHQDWL |
| | | NGKEYKCKVSNKALGAPIEKTISKAKGQPREPQVYTLPPCR |
| | | DELTKNQVSLWCLVKGFYPSDIAVEWESNGQPENNYKTTP |
| | | PVLDSDGSFFLYSKLTVDKSRWQQGNVFSCSVMHEALHN |
| | | HYTQKSLSLSPGGGGGSGGGGSREGPELSPDDPAGLLDLR |
| | | QGMFAQLVAQNVLLIDGPLSWYSDPGLAGVSLTGGLSYKE |
| | | DTKELVVAKAGVYYVFFQLELRRVVAGEGSGSVSLALHL |
| | | QPLRSAAGAAALALTVDLPPASSEARNSAFGFQGRLLHLS |
| | | AGQRLGVHLHTEARARHAWQLTQGATVLGLFRVTPEIPA |
| | | GL |
| 156 | anti- | EIVLTQSPATLSLSPGERATLSCRAGESVDIFGVGFLHWYQ |
| | CEA(T84.66- | QKPGQAPRLLIYRASNRATGIPARFSGSGSGTDFTLTISSLEP |
| | LCHA) light | EDFAVYYCQQTNEDPYTFGQGTKLEIKRTVAAPSVFIFPPS |
| | chain | DEQLKSGTASVVCLLNNFYPREAKVQWKVDNALQSGNSQ |
| | | ESVTEQDSKDSTYSLSSTLTLSKADYEKHKVYACEVTHQG |
| | | LSSPVTKSFNRGEC |

[0752] Table 18 shows the cDNA and amino acid sequences of the monovalent CEA(T84.66-LCHA)-targeted 4-1BB ligand (71-248) trimer-containing Fc (kih) fusion antigen binding molecule (Construct 5.12).

TABLE 18
Sequences of CEA(T84.66-LCHA)-targeted human 4-1BB ligand
trimer containing Fc (kih) fusion molecule Construct 5.12

| SEQ ID | | |
|---|---|---|
| NO: | Description | Sequence |
| 107 | nucleotide | see Table 2 |
| | sequence of Fc | |
| | hole monomeric | |
| | 4-1BBL (71-248) | |
| | chain | |
| 157 | nucleotide | CAGGTGCAGCTGGTGCAGTCTGGCGCCGAAGTGAAGAA |
| | sequence of anti- | ACCCGGCAGCAGCGTGAAGGTGTCCTGCAAGGCCAGCG |
| | CEA(T84.66- | GCTTCAACATCAAGGACACCTACATGCACTGGGTGCGCC |
| | LCHA) Fc knob | AGGCCCCTGGACAGGGACTGGAATGGATGGGCAGAATC |
| | dimeric 4-1BB | GACCCCGCCAACGGCAACAGCAAATACGTGCCCAAGTT |
| | (71-248) ligand | CCAGGGCAGAGTGACCATCACCGCCGACACCAGCACCT |
| | | CCACCGCCTACATGGAACTGAGCAGCCTGCGGAGCGAG |
| | | GACACCGCCGTGTACTACTGTGCCCCCTTCGGCTACTAC |
| | | GTGTCCGACTACGCCATGGCCTATTGGGGCCAGGGCAC |
| | | ACTCGTGACCGTGTCCTCTGCTAGCACCAAGGGCCCATC |
| | | GGTCTTCCCCCTGGCACCCTCCTCCAAGAGCACCTCTGG |
| | | GGGCACAGCGGCCCTGGGCTGCCTGGTCAAGGACTACT |
| | | TCCCCGAACCGGTGACGGTGTCGTGGAACTCAGGCGCC |
| | | CTGACCAGCGGCGTGCACACCTTCCCGGCTGTCCTACAG |
| | | TCCTCAGGACTCTACTCCCTCAGCAGCGTGGTGACCGTG |
| | | CCCTCCAGCAGCTTGGGCACCCAGACCTACATCTGCAAC |
| | | GTGAATCACAAGCCCAGCAACACCAAGGTGGACAAGAA |
| | | AGTTGAGCCCAAATCTTGTGACAAAACTCACACATGCCC |
| | | ACCGTGCCCAGCACCTGAAGCTGCAGGGGGACCGTCAG |
| | | TCTTCCTCTTCCCCCCAAAACCCAAGGACACCCTCATGA |
| | | TCTCCCGGACCCCTGAGGTCACATGCGTGGTGGTGGACG |
| | | TGAGCCACGAAGACCCTGAGGTCAAGTTCAACTGGTAC |
| | | GTGGACGGCGTGGAGGTGCATAATGCCAAGACAAAGCC |
| | | GCGGGAGGAGCAGTACAACAGCACGTACCGTGTGGTCA |
| | | GCGTCCTCACCGTCCTGCACCAGGACTGGCTGAATGGCA |
| | | AGGAGTACAAGTGCAAGGTCTCCAACAAAGCCCTCGGC |
| | | GCCCCCATCGAGAAAACCATCTCCAAAGCCAAAGGGCA |
| | | GCCCCGAGAACCACAGGTGTACACCCTGCCCCCCTGCA |
| | | GAGATGAGCTGACCAAGAACCAGGTGTCCCTGTGGTGT |
| | | CTGGTCAAGGGCTTCTACCCCAGCGATATCGCCGTGGAG |
| | | TGGGAGAGCAACGGCCAGCCTGAGAACAACTACAAGAC |
| | | CACCCCCCCTGTGCTGGACAGCGACGGCAGCTTCTTCCT |
| | | GTACTCCAAACTGACCGTGGACAAGAGCCGGTGGCAGC |
| | | AGGGCAACGTGTTCAGCTGCAGCGTGATGCACGAGGCC |
| | | CTGCACAACCACTACACCCAGAAGTCCCTGAGCCTGAG |
| | | CCCCGGCAGAGAGGGCCCTGAGCTGAGCCCTGATGATC |
| | | CTGCCGGACTGCTGGACCTGCGGCAGGGAATGTTTGCCC |
| | | AGCTGGTGGCCCAGAACGTGCTGCTGATCGATGGCCCCC |
| | | TGTCCTGGTACAGCGATCCTGGACTGGCTGGCGTGTCAC |
| | | TGACAGGCGGCCTGAGCTACAAAGAGGACACCAAAGAA |
| | | CTGGTGGTGGCCAAGGCCGGCGTGTACTACGTGTTCTTT |
| | | CAGCTGGAACTGCGGAGAGTGGTGGCCGGCGAAGGATC |
| | | TGGCTCTGTGTCTCTGGCCCTGCATCTGCAGCCTCTGAG |
| | | ATCTGCTGCTGGCGCCGCTGCTCTGGCACTGACAGTGGA |
| | | TCTGCCTCCTGCCAGCAGCGAGGCCCGGAATAGCGCATT |
| | | TGGGTTTCAAGGCAGGCTGCTGCACCTGTCTGCCGGCCA |
| | | GAGGCTGGGAGTGCATCTGCACACAGAGGCCAGGGCTA |
| | | GACACGCCTGGCAGCTGACACAGGGCGCTACAGTGCTG |
| | | GGCCTGTTCAGAGTGACCCCCGAGATTCCAGCAGGCCTG |
| | | GGAGGCGGCGGATCTGGCGGCGGAGGATCTAGAGAAGG |
| | | ACCCGAGCTGTCCCCCGACGATCCCGCTGGGCTGCTGGA |
| | | TCTGAGACAGGGCATGTTCGCTCAGCTGGTGGCTCAGAA |
| | | TGTGCTGCTGATTGACGGACCTCTGAGCTGGTACTCCGA |
| | | CCCAGGGCTGGCAGGGGTGTCCCTGACTGGGGGACTGT |
| | | CCTACAAAGAAGATACAAAAGAACTGGTGGTGGCTAAA |
| | | GCTGGGGTGTACTATGTGTTTTTTCAGCTGGAACTGAGG |
| | | CGGGTGGTGGCTGGGGAGGGCTCAGGATCTGTGTCCCTG |
| | | GCTCTGCATCTGCAGCCACTGCGCTCTGCAGCAGGGGCT |
| | | GCAGCACTGGCCCTGACTGTGGACCTGCCCCCAGCTTCT |
| | | TCCGAGGCCAGAAACAGCGCCTTCGGGTTCCAAGGACG |
| | | CCTGCTGCATCTGAGCGCCGGACAGCGCCTGGGAGTGC |
| | | ATCTGCATACTGAAGCCAGAGCCCGGCATGCTTGGCAG |
| | | CTGACTCAGGGGGCAACTGTGCTGGGACTGTTTCGCGTG |
| | | ACACCTGAGATCCCAGCCGGGCTC |
| 154 | nucleotide | See Table 17 |
| | sequence of anti- | |
| | CEA(T84.66- | |
| | LCHA) light | |
| | chain | |
| 109 | Fc hole | see Table 2 |
| | monomeric 4- | |
| | 1BB ligand (71- | |
| | 248) chain | |
| 158 | anti- | QVQLVQSGAEVKKPGSSVKVSCKASGFNIKDTYMHWVRQ |
| | CEA(T84.66- | APGQGLEWMGRIDPANGNSKYVPKFQGRVTITADTSTSTA |
| | LCHA) Fc knob | YMELSSLRSEDTAVYYCAPFGYYVSDYAMAYWGQGTLV |
| | dimeric 4-1BB | TVSSASTKGPSVFPLAPSSKSTSGGTAALGCLVKDYFPEPV |
| | (71-248) ligand | TVSWNSGALTSGVHTFPAVLQSSGLYSLSSVVTVPSSSLGT |
| | | QTYICNVNHKPSNTKVDKKVEPKSCDKTHTCPPCPAPEAA |
| | | GGPSVFLFPPKPKDTLMISRTPEVTCVVVDVSHEDPEVKFN |
| | | WYVDGVEVHNAKTKPREEQYNSTYRVVSVLTVLHQDWL |
| | | NGKEYKCKVSNKALGAPIEKTISKAKGQPREPQVYTLPPCR |
| | | DELTKNQVSLWCLVKGFYPSDIAVEWESNGQPENNYKTTP |
| | | PVLDSDGSFFLYSKLTVDKSRWQQGNVFSCSVMHEALHN |
| | | HYTQKSLSLSPGREGPELSPDDPAGLLDLRQGMFAQLVAQ |
| | | NVLLIDGPLSWYSDPGLAGVSLTGGLSYKEDTKELVVAKA |
| | | GVYYVFFQLELRRVVAGEGSGSVSLALHLQPLRSAAGAAA |
| | | LALTVDLPPASSEARNSAFGFQGRLLHLSAGQRLGVHLHT |
| | | EARARHAWQLTQGATVLGLFRVTPEIPAGLGGGGSGGGGS |
| | | REGPELSPDDPAGLLDLRQGMFAQLVAQNVLLIDGPLSWY |
| | | SDPGLAGVSLTGGLSYKEDTKELVVAKAGVYYVFFQLELR |
| | | RVVAGEGSGSVSLALHLQPLRSAAGAAALALTVDLPPASS |
| | | EARNSAFGFQGRLLHLSAGQRLGVHLHTEARARHAWQLT |
| | | QGATVLGLFRVTPEIPAGL |
| 156 | anti- | See Table 17 |
| | CEA(T84.66- | |
| | LCHA) light | |
| | chain | |

[0753] 1.5 Generation of Anti-CEA Clone T84.66-LCHA

[0754] 1.5.1 Humanization of Anti-CEA Clone T84.66

[0755] Novel humanized variants of the murine antibody T84.66 (Wagener et al., J Immunol 130, 2308 (1983), Neumaier et al., J Immunol 135, 3604 (1985)) were developed by grafting of the CDRs onto human germline framework acceptor sequences.

[0756] Humanization of an antibody from non-human origin consists essentially of transplanting the CDR residues from the non-human antibody (donor) onto the framework of a human (acceptor) antibody. Normally the acceptor framework is selected by aligning the sequence of the donor to a collection of potential acceptor sequences and choosing one that has either reasonable homology to the donor, or shows similar amino acids at some positions critical for structure and activity. In the present case, the search for the antibody acceptor framework was performed by aligning the mouse T84.66 protein (NCBI Acc No: CAA36980 for the heavy chain (SEQ ID NO:159), and CAA36979 (SEQ ID NO:160) for the light chain) sequence to a collection of human germ-line sequences and picking that human sequence that showed high sequence identity. Here, the sequence IGHV1-69*08 from the IMGT database was chosen as the heavy chain framework acceptor sequence (IMGT Acc No. Z14309, SEQ ID NO:161), and the IGKV3-11*01 sequence (IMGT Acc No. X01668, SEQ ID NO:162) was chosen to be the framework acceptor for the light chain. Onto these two acceptor frameworks, the three complementary determining regions (CDRs) of the mouse heavy and light variable domains were grafted. Since the framework 4 (FR4) region is not part of the variable region of the germ line V gene, the alignment for that position was done individually. The JH4 sequence was chosen for the heavy chain, and the JK2 sequence was chosen for the light chain.

[0757] 11.1.2 Binding of Different Humanized Variants of T84.66 IgG to Cells

[0758] The binding of different humanized variants of T84.66 IgG was tested on CEA-expressing human gastric adenocarcinoma cells (MKN45, DSMZ ACC 409).

[0759] Cells were harvested, counted, checked for viability and re-suspended at 2×10⁶ cells/ml in FACS buffer (100 μl PBS 0.1% BSA). 100 μl of cell suspension (containing 0.2×10⁶ cells) were incubated in round-bottom 96-well plate for 30 min at 4° C. with increasing concentrations of the CEA IgG (4 ng/ml-60 μg/ml), washed twice with cold PBS 0.1% BSA, re-incubated for further 30 min at 4° C. with the PE-conjugated AffiniPure F(ab′)2 Fragment goat anti-human IgG Fcg Fragment Specific secondary antibody (Jackson Immuno Research Lab PE #109-116-170), washed twice with cold PBS 0.1% BSA and immediately analyzed by FACS using a FACS Cantoll (Software FACS Diva). Binding curves and EC50 values were obtained and calculated using GraphPadPrism5.

[0760] Table 19 shows the different binding data of selected humanized variants of the T84.66 IgG to human CEA, expressed on MKN45 cells. Based on the calculated EC50 binding values the humanized variant 1 was selected for further evaluation.

TABLE 19
Binding of different humanized variants of T84.66 IgGs to cells

| | EC50 (μg/ml) |
|---|---|
| Parental chimeric T84.66 | 0.99 |
| Humanized variant 1 | 1.5 |
| Humanized variant 2 | 8.6 |
| Humanized variant 3 | 1.4 |
| Humanized variant 4 | 3.1 |

[0761] Humanized variant 1 is termed in the following T84.66-LCHA. The amino acid sequences of its CDRs and of the VH and VL as well as the amino acid sequences of the VH and VL domain of the parental chimeric T84.66 clone are shown in Table 20.

TABLE 20
Amino acid sequences of the variable domains of CEA clone
T84.66-LCHA and its parental antibody T84.66

| | | SEQ ID |
|---|---|---|
| Description | Sequence | NO: |
| CEA CDR-H1 | DTYMH | 45 |
| CEA CDR-H2 | RIDPANGNSKYVPKFQG | 46 |
| CEA CDR-H3 | FGYYVSDYAMAY | 47 |
| CEA CDR-L1 | RAGESVDIFGVGFLH | 48 |
| CEA CDR-L2 | RASNRAT | 49 |
| CEA CDR-L3 | QQTNEDPYT | 50 |
| Parental CEA | EVQLQQSGAELVEPGASVKLSCTASGFNIKDTYMHWVKQRPEQ | 163 |
| binder VH | GLEWIGRIDPANGNSKYVPKFQGKATITADTSSNTAYLQLTSLTS | |
| | EDTAVYYCAPFGYYVSDYAMAYWGQGTSVTVSS | |
| Parental CEA | DIVLTQSPASLAVSLGQRATMSCRAGESVDIFGVGFLHWYQQKP | 164 |
| binder VL | GQPPKLLIYRASNLESGIPVRFSGTGSRTDFTLIIDPVEADDVATY | |
| | YCQQTNEDPYTFGGGTKLEIK | |
| Humanized | QVQLVQSGAEVKKPGSSVKVSCKASGFNIKDTYMHWVRQAPGQ | 51 |
| CEA binder | GLEWMGRIDPANGNSKYVPKFQGRVTITADTSTSTAYMELSSLR | |
| CEA (T84.66- | SEDTAVYYCAPFGYYVSDYAMAYWGQGTLVTVSS | |
| LCHA) VH | | |
| Humanized | EIVLTQSPATLSLSPGERATLSCRAGESVDIFGVGFLHWYQQKPG | 52 |
| CEA binder | QAPRLLIYRASNRATGIPARFSGSGSGTDFTLTISSLEPEDFAVYY | |
| CEA (T84.66- | CQQTNEDPYTFGQGTKLEIK | |
| LCHA) VL | | |

[0762] 1.6 Preparation of Monovalent Untargeted 4-1BB Ligand Trimer-Containing Fc (kih) Fusion Antigen Binding Molecules, wherein the 4-1BB Ligands are C-Terminally Fused (Controls H and I) (DP47 on the Knob Chain)

[0763] The molecule was prepared as described in Example 1.1 for the monovalent FAP targeted construct, with the only difference that the anti-FAP binder (VH-VL) was replaced by a germline control, termed DP47, not binding to the antigen.

[0764] Table 21 shows the cDNA and amino acid sequences of the monovalent untargeted 4-1BB ligand (71-248) trimer-containing Fc (kih) fusion antigen binding molecule (Control H).

TABLE 21
Sequences of monovalent DP47-untargeted human 4-1BB ligand trimer
containing Fc (kih) fusion molecule Control H

| SEQ ID | | |
|---|---|---|
| NO: | Description | Sequence |
| 101 | nucleotide | see Table 1 |
| | sequence of Fc | |
| | hole dimeric 4- | |
| | 1BB ligand (71- | |
| | 248) chain | |
| 165 | nucleotide | GAGGTGCAATTGTTGGAGTCTGGGGGAGGCTTGGTACA |
| | sequence of DP47 | GCCTGGGGGGTCCCTGAGACTCTCCTGTGCAGCCTCCGG |
| | Fc knob | ATTCACCTTTAGCAGTTATGCCATGAGCTGGGTCCGCCA |
| | monomeric 4- | GGCTCCAGGGAAGGGGCTGGAGTGGGTCTCAGCTATTA |
| | 1BB (71-248) | GTGGTAGTGGTGGTAGCACATACTACGCAGACTCCGTGA |
| | ligand | AGGGCCGGTTCACCATCTCCAGAGACAATTCCAAGAAC |
| | | ACGCTGTATCTGCAGATGAACAGCCTGAGAGCCGAGGA |
| | | CACGGCCGTATATTACTGTGCGAAAGGCAGCGGATTTGA |
| | | CTACTGGGGCCAAGGAACCCTGGTCACCGTCTCGAGT |
| | | GCTAGCACCAAGGGCCCATCGGTCTTCCCCCTGGCACCC |
| | | TCCTCCAAGAGCACCTCTGGGGGCACAGCGGCCCTGGG |
| | | CTGCCTGGTCAAGGACTACTTCCCCGAACCGGTGACGGT |
| | | GTCGTGGAACTCAGGCGCCCTGACCAGCGGCGTGCACA |
| | | CCTTCCCGGCTGTCCTACAGTCCTCAGGACTCTACTCCCT |
| | | CAGCAGCGTGGTGACCGTGCCCTCCAGCAGCTTGGGCA |
| | | CCCAGACCTACATCTGCAACGTGAATCACAAGCCCAGC |
| | | AACACCAAGGTGGACAAGAAAGTTGAGCCCAAATCTTG |
| | | TGACAAAACTCACACATGCCCACCGTGCCCAGCACCTG |
| | | AAGCTGCAGGGGGACCGTCAGTCTTCCTCTTCCCCCCAA |
| | | AACCCAAGGACACCCTCATGATCTCCCGGACCCCTGAG |
| | | GTCACATGCGTGGTGGTGGACGTGAGCCACGAAGACCC |
| | | TGAGGTCAAGTTCAACTGGTACGTGGACGGCGTGGAGG |
| | | TGCATAATGCCAAGACAAAGCCGCGGGAGGAGCAGTAC |
| | | AACAGCACGTACCGTGTGGTCAGCGTCCTCACCGTCCTG |
| | | CACCAGGACTGGCTGAATGGCAAGGAGTACAAGTGCAA |
| | | GGTCTCCAACAAAGCCCTCGGCGCCCCCATCGAGAAAA |
| | | CCATCTCCAAAGCCAAAGGGCAGCCCCGAGAACCACAG |
| | | GTGTACACCCTGCCCCCCTGCAGAGATGAGCTGACCAA |
| | | GAACCAGGTGTCCCTGTGGTGTCTGGTCAAGGGCTTCTA |
| | | CCCCAGCGATATCGCCGTGGAGTGGGAGAGCAACGGCC |
| | | AGCCTGAGAACAACTACAAGACCACCCCCCCTGTGCTG |
| | | GACAGCGACGGCAGCTTCTTCCTGTACTCCAAACTGACC |
| | | GTGGACAAGAGCCGGTGGCAGCAGGGCAACGTGTTCAG |
| | | CTGCAGCGTGATGCACGAGGCCCTGCACAACCACTACA |
| | | CCCAGAAGTCCCTGAGCCTGAGCCCCGGCGGAGGCGGC |
| | | GGAAGCGGAGGAGGAGGATCCAGAGAGGGCCCTGAGCT |
| | | GAGCCCTGATGATCCTGCCGGACTGCTGGACCTGCGGCA |
| | | GGGAATGTTTGCCCAGCTGGTGGCCCAGAACGTGCTGCT |
| | | GATCGATGGCCCCCTGTCCTGGTACAGCGATCCTGGACT |
| | | GGCTGGCGTGTCACTGACAGGCGGCCTGAGCTACAAAG |
| | | AGGACACCAAAGAACTGGTGGTGGCCAAGGCCGGCGTG |
| | | TACTACGTGTTCTTTCAGCTGGAACTGCGGAGAGTGGTG |
| | | GCCGGCGAAGGATCTGGCTCTGTGTCTCTGGCCCTGCAT |
| | | CTGCAGCCTCTGAGATCTGCTGCTGGCGCCGCTGCTCTG |
| | | GCACTGACAGTGGATCTGCCTCCTGCCAGCAGCGAGGC |
| | | CCGGAATAGCGCATTTGGGTTTCAAGGCAGGCTGCTGCA |
| | | CCTGTCTGCCGGCCAGAGGCTGGGAGTGCATCTGCACAC |
| | | AGAGGCCAGGGCTAGACACGCCTGGCAGCTGACACAGG |
| | | GCGCTACAGTGCTGGGCCTGTTCAGAGTGACCCCCGAG |
| | | ATTCCTGCCGGGCTC |
| 166 | nucleotide | GAAATCGTGTTAACGCAGTCTCCAGGCACCCTGTCTTTG |
| | sequence of DP47 | TCTCCAGGGGAAAGAGCCACCCTCTCTTGCAGGGCCAGT |
| | light chain | CAGAGTGTTAGCAGCAGCTACTTAGCCTGGTACCAGCAG |
| | | AAACCTGGCCAGGCTCCCAGGCTCCTCATCTATGGAGCA |
| | | TCCAGCAGGGCCACTGGCATCCCAGACAGGTTCAGTGG |
| | | CAGTGGATCCGGGACAGACTTCACTCTCACCATCAGCAG |
| | | ACTGGAGCCTGAAGATTTTGCAGTGTATTACTGTCAGCA |
| | | GTATGGTAGCTCACCGCTGACGTTCGGCCAGGGGACCA |
| | | AAGTGGAAATCAAACGTACGGTGGCTGCACCATCTGTCT |
| | | TCATCTTCCCGCCATCTGATGAGCAGTTGAAATCTGGAA |
| | | CTGCCTCTGTTGTGTGCCTGCTGAATAACTTCTATCCCAG |
| | | AGAGGCCAAAGTACAGTGGAAGGTGGATAACGCCCTCC |
| | | AATCGGGTAACTCCCAGGAGAGTGTCACAGAGCAGGAC |
| | | AGCAAGGACAGCACCTACAGCCTCAGCAGCACCCTGAC |
| | | GCTGAGCAAAGCAGACTACGAGAAACACAAAGTCTACG |
| | | CCTGCGAAGTCACCCATCAGGGCCTGAGCTCGCCCGTCA |
| | | CAAAGAGCTTCAACAGGGGAGAGTGT |
| 104 | Fc hole dimeric 4- | see Table 1 |
| | 1BB (71-248) | |
| | ligand chain | |
| 167 | DP47 Fc knob | EVQLLESGGGLVQPGGSLRLSCAASGFTFSSYAMSWVRQA |
| | monomeric 4-1- | PGKGLEWVSAISGSGGSTYYADSVKGRFTISRDNSKNTLYL |
| | BB (71-248) | QMNSLRAEDTAVYYCAKGSGFDYWGQGTLVTVSSASTKG |
| | ligand | PSVFPLAPSSKSTSGGTAALGCLVKDYFPEPVTVSWNSGAL |
| | | TSGVHTFPAVLQSSGLYSLSSVVTVPSSSLGTQTYICNVNH |
| | | KPSNTKVDKKVEPKSCDKTHTCPPCPAPEAAGGPSVFLFPP |
| | | KPKDTLMISRTPEVTCVVVDVSHEDPEVKFNWYVDGVEV |
| | | HNAKTKPREEQYNSTYRVVSVLTVLHQDWLNGKEYKCKV |
| | | SNKALGAPIEKTISKAKGQPREPQVYTLPPCRDELTKNQVS |
| | | LWCLVKGFYPSDIAVEWESNGQPENNYKTTPPVLDSDGSF |
| | | FLYSKLTVDKSRWQQGNVFSCSVMHEALHNHYTQKSLSL |
| | | SPGGGGGSGGGGSREGPELSPDDPAGLLDLRQGMFAQLVA |
| | | QNVLLIDGPLSWYSDPGLAGVSLTGGLSYKEDTKELVVAK |
| | | AGVYYVFFQLELRRVVAGEGSGSVSLALHLQPLRSAAGAA |
| | | ALALTVDLPPASSEARNSAFGFQGRLLHLSAGQRLGVHLH |
| | | TEARARHAWQLTQGATVLGLFRVTPEIPAGL |
| 168 | DP47 light chain | EIVLTQSPGTLSLSPGERATLSCRASQSVSSSYLAWYQQKP |
| | | GQAPRLLIYGASSRATGIPDRFSGSGSGTDFTLTISRLEPEDF |
| | | AVYYCQQYGSSPLTFGQGTKVEIKRTVAAPSVFIFPPSDEQ |
| | | LKSGTASVVCLLNNFYPREAKVQWKVDNALQSGNSQESV |
| | | TEQDSKDSTYSLSSTLTLSKADYEKHKVYACEVTHQGLSS |
| | | PVTKSFNRGEC |

[0765] Table 22 shows the cDNA and amino acid sequences of the monovalent untargeted 4-1BB ligand (71-248) trimer-containing Fc (kih) fusion antigen binding molecule (Control I).

TABLE 22
Sequences of monovalent DP47-untargeted human 4-1BB ligand
trimer containing Fc (kih) fusion molecule Control I

| SEQ ID | | |
|---|---|---|
| NO: | Description | Sequence |
| 107 | nucleotide | see Table 2 |
| | sequence of Fc | |
| | hole monomeric | |
| | 4-1BBL (71-248) | |
| | chain | |
| 169 | nucleotide | GAGGTGCAATTGTTGGAGTCTGGGGGAGGCTTGGTACA |
| | sequence of DP47 | GCCTGGGGGGTCCCTGAGACTCTCCTGTGCAGCCTCCGG |
| | Fc knob dimeric | ATTCACCTTTAGCAGTTATGCCATGAGCTGGGTCCGCCA |
| | 4-1BBL (71-248) | GGCTCCAGGGAAGGGGCTGGAGTGGGTCTCAGCTATTA |
| | | GTGGTAGTGGTGGTAGCACATACTACGCAGACTCCGTGA |
| | | AGGGCCGGTTCACCATCTCCAGAGACAATTCCAAGAAC |
| | | ACGCTGTATCTGCAGATGAACAGCCTGAGAGCCGAGGA |
| | | CACGGCCGTATATTACTGTGCGAAAGGCAGCGGATTTGA |
| | | CTACTGGGGCCAAGGAACCCTGGTCACCGTCTCGAGTGC |
| | | TAGCACCAAGGGCCCATCGGTCTTCCCCCTGGCACCCTC |
| | | CTCCAAGAGCACCTCTGGGGGCACAGCGGCCCTGGGCT |
| | | GCCTGGTCAAGGACTACTTCCCCGAACCGGTGACGGTGT |
| | | CGTGGAACTCAGGCGCCCTGACCAGCGGCGTGCACACC |
| | | TTCCCGGCTGTCCTACAGTCCTCAGGACTCTACTCCCTC |
| | | AGCAGCGTGGTGACCGTGCCCTCCAGCAGCTTGGGCAC |
| | | CCAGACCTACATCTGCAACGTGAATCACAAGCCCAGCA |
| | | ACACCAAGGTGGACAAGAAAGTTGAGCCCAAATCTTGT |
| | | GACAAAACTCACACATGCCCACCGTGCCCAGCACCTGA |
| | | AGCTGCAGGGGGACCGTCAGTCTTCCTCTTCCCCCCAAA |
| | | ACCCAAGGACACCCTCATGATCTCCCGGACCCCTGAGGT |
| | | CACATGCGTGGTGGTGGACGTGAGCCACGAAGACCCTG |
| | | AGGTCAAGTTCAACTGGTACGTGGACGGCGTGGAGGTG |
| | | CATAATGCCAAGACAAAGCCGCGGGAGGAGCAGTACAA |
| | | CAGCACGTACCGTGTGGTCAGCGTCCTCACCGTCCTGCA |
| | | CCAGGACTGGCTGAATGGCAAGGAGTACAAGTGCAAGG |
| | | TCTCCAACAAAGCCCTCGGCGCCCCCATCGAGAAAACC |
| | | ATCTCCAAAGCCAAAGGGCAGCCCCGAGAACCACAGGT |
| | | GTACACCCTGCCCCCCTGCAGAGATGAGCTGACCAAGA |
| | | ACCAGGTGTCCCTGTGGTGTCTGGTCAAGGGCTTCTACC |
| | | CCAGCGATATCGCCGTGGAGTGGGAGAGCAACGGCCAG |
| | | CCTGAGAACAACTACAAGACCACCCCCCCTGTGCTGGA |
| | | CAGCGACGGCAGCTTCTTCCTGTACTCCAAACTGACCGT |
| | | GGACAAGAGCCGGTGGCAGCAGGGCAACGTGTTCAGCT |
| | | GCAGCGTGATGCACGAGGCCCTGCACAACCACTACACC |
| | | CAGAAGTCCCTGAGCCTGAGCCCCGGCAGAGAGGGCCC |
| | | TGAGCTGAGCCCTGATGATCCTGCCGGACTGCTGGACCT |
| | | GCGGCAGGGAATGTTTGCCCAGCTGGTGGCCCAGAACG |
| | | TGCTGCTGATCGATGGCCCCCTGTCCTGGTACAGCGATC |
| | | CTGGACTGGCTGGCGTGTCACTGACAGGCGGCCTGAGCT |
| | | ACAAAGAGGACACCAAAGAACTGGTGGTGGCCAAGGCC |
| | | GGCGTGTACTACGTGTTCTTTCAGCTGGAACTGCGGAGA |
| | | GTGGTGGCCGGCGAAGGATCTGGCTCTGTGTCTCTGGCC |
| | | CTGCATCTGCAGCCTCTGAGATCTGCTGCTGGCGCCGCT |
| | | GCTCTGGCACTGACAGTGGATCTGCCTCCTGCCAGCAGC |
| | | GAGGCCCGGAATAGCGCATTTGGGTTTCAAGGCAGGCT |
| | | GCTGCACCTGTCTGCCGGCCAGAGGCTGGGAGTGCATCT |
| | | GCACACAGAGGCCAGGGCTAGACACGCCTGGCAGCTGA |
| | | CACAGGGCGCTACAGTGCTGGGCCTGTTCAGAGTGACC |
| | | CCCGAGATTCCAGCAGGCCTGGGAGGCGGCGGATCTGG |
| | | CGGCGGAGGATCTAGAGAAGGACCCGAGCTGTCCCCCG |
| | | ACGATCCCGCTGGGCTGCTGGATCTGAGACAGGGCATGT |
| | | TCGCTCAGCTGGTGGCTCAGAATGTGCTGCTGATTGACG |
| | | GACCTCTGAGCTGGTACTCCGACCCAGGGCTGGCAGGG |
| | | GTGTCCCTGACTGGGGGACTGTCCTACAAAGAAGATAC |
| | | AAAAGAACTGGTGGTGGCTAAAGCTGGGGTGTACTATG |
| | | TGTTTTTTCAGCTGGAACTGAGGCGGGTGGTGGCTGGGG |
| | | AGGGCTCAGGATCTGTGTCCCTGGCTCTGCATCTGCAGC |
| | | CACTGCGCTCTGCAGCAGGGGCTGCAGCACTGGCCCTG |
| | | ACTGTGGACCTGCCCCCAGCTTCTTCCGAGGCCAGAAAC |
| | | AGCGCCTTCGGGTTCCAAGGACGCCTGCTGCATCTGAGC |
| | | GCCGGACAGCGCCTGGGAGTGCATCTGCATACTGAAGC |
| | | CAGAGCCCGGCATGCTTGGCAGCTGACTCAGGGGGCAA |
| | | CTGTGCTGGGACTGTTTCGCGTGACACCTGAGATCCCAG |
| | | CCGGGCTC |
| 166 | nucleotide | See Table 21 |
| | sequence of DP47 | |
| | light chain | |
| 109 | Fc hole | see Table 2 |
| | monomeric 4- | |
| | 1BB ligand (71- | |
| | 248) chain | |
| 170 | DP47 Fc knob | EVQLLESGGGLVQPGGSLRLSCAASGFTFSSYAMSWVRQA |
| | dimeric 4-1BBL | PGKGLEWVSAISGSGGSTYYADSVKGRFTISRDNSKNTLYL |
| | (71-248) | QMNSLRAEDTAVYYCAKGSGFDYWGQGTLVTVSSASTKG |
| | | PSVFPLAPSSKSTSGGTAALGCLVKDYFPEPVTVSWNSGAL |
| | | TSGVHTFPAVLQSSGLYSLSSVVTVPSSSLGTQTYICNVNH |
| | | KPSNTKVDKKVEPKSCDKTHTCPPCPAPEAAGGPSVFLFPP |
| | | KPKDTLMISRTPEVTCVVVDVSHEDPEVKFNWYVDGVEV |
| | | HNAKTKPREEQYNSTYRVVSVLTVLHQDWLNGKEYKCKV |
| | | SNKALGAPIEKTISKAKGQPREPQVYTLPPCRDELTKNQVS |
| | | LWCLVKGFYPSDIAVEWESNGQPENNYKTTPPVLDSDGSF |
| | | FLYSKLTVDKSRWQQGNVFSCSVMHEALHNHYTQKSLSL |
| | | SPGREGPELSPDDPAGLLDLRQGMFAQLVAQNVLLIDGPLS |
| | | WYSDPGLAGVSLTGGLSYKEDTKELVVAKAGVYYVFFQL |
| | | ELRRVVAGEGSGSVSLALHLQPLRSAAGAAALALTVDLPP |
| | | ASSEARNSAFGFQGRLLHLSAGQRLGVHLHTEARARHAW |
| | | QLTQGATVLGLFRVTPEIPAGLGGGGSGGGGSREGPELSPD |
| | | DPAGLLDLRQGMFAQLVAQNVLLIDGPLSWYSDPGLAGV |
| | | SLTGGLSYKEDTKELVVAKAGVYYVFFQLELRRVVAGEGS |
| | | GSVSLALHLQPLRSAAGAAALALTVDLPPASSEARNSAFGF |
| | | QGRLLHLSAGQRLGVHLHTEARARHAWQLTQGATVLGLF |
| | | RVTPEIPAGL |
| 168 | DP47 light chain | See Table 21 |

[0766] 1.7 Preparation of Monovalent FAP-Targeted 4-1BB Ligand Trimer-Containing Fc (kih) Fusion Antigen Binding Molecule, wherein the 4-1BB Ligands are C-Terminally Fused (Constructs 1.13, 2.13, 1.14 and 2.14) (FAP on the Hole Chain)

[0767] A polypeptide containing two ectodomains of 4-1BB ligand, separated by (G4S)₂ linkers was subcloned in frame to the C-terminus of human IgG1 Fc hole or knob chain (Merchant, Zhu 1998), as depicted in FIG. 1a: human IgG1 Fc, (G4S)₂ connector, human 4-1BB ligand, (G4S)₂ connector, human 4-1BB ligand. A polypeptide containing one ectodomain of 4-1BB ligand was subcloned in frame to the C-terminus of human IgG1 Fc knob or hole chain as described in FIG. 1b: human IgG1 Fc, (G4S)₂ connector, human 4-1BB ligand.

[0768] The variable region of heavy and light chain DNA sequences encoding a binder specific for fibroblast activation protein (FAP), clone 4B9 or clone 28H1, were subcloned in frame with either the constant heavy chain of the hole or the constant light chain of human IgG1. The generation and preparation of the FAP binders is described in WO 2012/020006 A2, which is incorporated herein by reference.

[0769] The Pro329Gly, Leu234Ala and Leu235Ala mutations have been introduced in the constant region of the knob and hole heavy chains to abrogate binding to Fc gamma receptors according to the method described in International Patent Appl. Publ. No. WO 2012/130831 A1.

[0770] For all constructs the knobs into holes heterodimerization technology was used as described in Carter, J Immunol Methods 248, 7-15 (2001). Combination of the hulgG1 Fc hole chain containing the Y349C/T366S/L368A/Y407V mutations in the CH3 domain, the anti-FAP huIgG1 knob chain containing the S354C/T366W mutations in the CH3 domain and the anti-FAP light chain allows generation of a heterodimer, which includes an assembled trimeric 4-1BB ligand and one FAP binding Fab (FIGS. 2C and 2D).

[0771] Table 23 shows the cDNA and amino acid sequences of the monovalent FAP(4B9)-targeted 4-1BB ligand (71-248) trimer-containing Fc (kih) fusion antigen binding molecule (Construct 2.13).

TABLE 23
Sequences of FAP(4B9)-targeted human 4-1BB ligand trimer
containing Fc (kih) fusion molecule Construct 2.13

| SEQ ID | | |
|---|---|---|
| NO: | Description | Sequence |
| 171 | nucleotide | GAGGTGCAGCTGCTCGAAAGCGGCGGAGGACTGGTGCA |
| | sequence of anti- | GCCTGGCGGCAGCCTGAGACTGTCTTGCGCCGCCAGCG |
| | FAP(4B9) Fc | GCTTCACCTTCAGCAGCTACGCCATGAGCTGGGTCCGCC |
| | hole dimeric 4- | AGGCCCCTGGCAAGGGACTGGAATGGGTGTCCGCCATC |
| | 1BB ligand (71- | ATCGGCTCTGGCGCCAGCACCTACTACGCCGACAGCGTG |
| | 248) chain | AAGGGCCGGTTCACCATCAGCCGGGACAACAGCAAGAA |
| | | CACCCTGTACCTGCAGATGAACAGCCTGCGGGCCGAGG |
| | | ACACCGCCGTGTACTACTGCGCCAAGGGATGGTTCGGC |
| | | GGCTTCAACTACTGGGGACAGGGCACCCTGGTCACAGT |
| | | GTCCAGCGCTAGCACCAAGGGCCCCTCCGTGTTCCCCCT |
| | | GGCCCCCAGCAGCAAGAGCACCAGCGGCGGCACAGCCG |
| | | CTCTGGGCTGCCTGGTCAAGGACTACTTCCCCGAGCCCG |
| | | TGACCGTGTCCTGGAACAGCGGAGCCCTGACCTCCGGC |
| | | GTGCACACCTTCCCCGCCGTGCTGCAGAGTTCTGGCCTG |
| | | TATAGCCTGAGCAGCGTGGTCACCGTGCCTTCTAGCAGC |
| | | CTGGGCACCCAGACCTACATCTGCAACGTGAACCACAA |
| | | GCCCAGCAACACCAAGGTGGACAAGAAGGTGGAGCCCA |
| | | AGAGCTGCGACAAAACTCACACATGCCCACCGTGCCCA |
| | | GCACCTGAAGCTGCAGGGGGACCGTCAGTCTTCCTCTTC |
| | | CCCCCAAAACCCAAGGACACCCTCATGATCTCCCGGACC |
| | | CCTGAGGTCACATGCGTGGTGGTGGACGTGAGCCACGA |
| | | AGACCCTGAGGTCAAGTTCAACTGGTACGTGGACGGCG |
| | | TGGAGGTGCATAATGCCAAGACAAAGCCGCGGGAGGAG |
| | | CAGTACAACAGCACGTACCGTGTGGTCAGCGTCCTCACC |
| | | GTCCTGCACCAGGACTGGCTGAATGGCAAGGAGTACAA |
| | | GTGCAAGGTCTCCAACAAAGCCCTCGGCGCCCCCATCG |
| | | AGAAAACCATCTCCAAAGCCAAAGGGCAGCCCCGAGAA |
| | | CCACAGGTGTGCACCCTGCCCCCATCCCGGGATGAGCTG |
| | | ACCAAGAACCAGGTCAGCCTCTCGTGCGCAGTCAAAGG |
| | | CTTCTATCCCAGCGACATCGCCGTGGAGTGGGAGAGCA |
| | | ATGGGCAGCCGGAGAACAACTACAAGACCACGCCTCCC |
| | | GTGCTGGACTCCGACGGCTCCTTCTTCCTCGTGAGCAAG |
| | | CTCACCGTGGACAAGAGCAGGTGGCAGCAGGGGAACGT |
| | | CTTCTCATGCTCCGTGATGCATGAGGCTCTGCACAACCA |
| | | CTACACGCAGAAGAGCCTCTCCCTGTCTCCGGGTGGAGG |
| | | CGGCGGAAGCGGAGGAGGAGGATCCAGAGAGGGCCCT |
| | | GAGCTGAGCCCTGATGATCCTGCCGGACTGCTGGACCTG |
| | | CGGCAGGGAATGTTTGCCCAGCTGGTGGCCCAGAACGT |
| | | GCTGCTGATCGATGGCCCCCTGTCCTGGTACAGCGATCC |
| | | TGGACTGGCTGGCGTGTCACTGACAGGCGGCCTGAGCTA |
| | | CAAAGAGGACACCAAAGAACTGGTGGTGGCCAAGGCCG |
| | | GCGTGTACTACGTGTTCTTTCAGCTGGAACTGCGGAGAG |
| | | TGGTGGCCGGCGAAGGATCTGGCTCTGTGTCTCTGGCCC |
| | | TGCATCTGCAGCCTCTGAGATCTGCTGCTGGCGCCGCTG |
| | | CTCTGGCACTGACAGTGGATCTGCCTCCTGCCAGCAGCG |
| | | AGGCCCGGAATAGCGCATTTGGGTTTCAAGGCAGGCTG |
| | | CTGCACCTGTCTGCCGGCCAGAGGCTGGGAGTGCATCTG |
| | | CACACAGAGGCCAGGGCTAGACACGCCTGGCAGCTGAC |
| | | ACAGGGCGCTACAGTGCTGGGCCTGTTCAGAGTGACCC |
| | | CCGAGATTCCAGCAGGCCTGGGAGGCGGCGGATCTGGC |
| | | GGCGGAGGATCTAGAGAAGGACCCGAGCTGTCCCCCGA |
| | | CGATCCCGCTGGGCTGCTGGATCTGAGACAGGGCATGTT |
| | | CGCTCAGCTGGTGGCTCAGAATGTGCTGCTGATTGACGG |
| | | ACCTCTGAGCTGGTACTCCGACCCAGGGCTGGCAGGGG |
| | | TGTCCCTGACTGGGGGACTGTCCTACAAAGAAGATACA |
| | | AAAGAACTGGTGGTGGCTAAAGCTGGGGTGTACTATGT |
| | | GTTTTTTCAGCTGGAACTGAGGCGGGTGGTGGCTGGGGA |
| | | GGGCTCAGGATCTGTGTCCCTGGCTCTGCATCTGCAGCC |
| | | ACTGCGCTCTGCAGCAGGGGCTGCAGCACTGGCCCTGA |
| | | CTGTGGACCTGCCCCCAGCTTCTTCCGAGGCCAGAAACA |
| | | GCGCCTTCGGGTTCCAAGGACGCCTGCTGCATCTGAGCG |
| | | CCGGACAGCGCCTGGGAGTGCATCTGCATACTGAAGCC |
| | | AGAGCCCGGCATGCTTGGCAGCTGACTCAGGGGGCAAC |
| | | TGTGCTGGGACTGTTTCGCGTGACACCTGAGATCCCAGC |
| | | CGGGCTC |
| 172 | nucleotide | GACAAAACTCACACATGCCCACCGTGCCCAGCACCTGA |
| | sequence of Fc | AGCTGCAGGGGGACCGTCAGTCTTCCTCTTCCCCCCAAA |
| | knob monomeric | ACCCAAGGACACCCTCATGATCTCCCGGACCCCTGAGGT |
| | 4-1BB (71-248) | CACATGCGTGGTGGTGGACGTGAGCCACGAAGACCCTG |
| | ligand | AGGTCAAGTTCAACTGGTACGTGGACGGCGTGGAGGTG |
| | | CATAATGCCAAGACAAAGCCGCGGGAGGAGCAGTACAA |
| | | CAGCACGTACCGTGTGGTCAGCGTCCTCACCGTCCTGCA |
| | | CCAGGACTGGCTGAATGGCAAGGAGTACAAGTGCAAGG |
| | | TCTCCAACAAAGCCCTCGGCGCCCCCATCGAGAAAACC |
| | | ATCTCCAAAGCCAAAGGGCAGCCCCGAGAACCACAGGT |
| | | GTACACCCTGCCCCCCTGCAGAGATGAGCTGACCAAGA |
| | | ACCAGGTGTCCCTGTGGTGTCTGGTCAAGGGCTTCTACC |
| | | CCAGCGATATCGCCGTGGAGTGGGAGAGCAACGGCCAG |
| | | CCTGAGAACAACTACAAGACCACCCCCCCTGTGCTGGA |
| | | CAGCGACGGCAGCTTCTTCCTGTACTCCAAACTGACCGT |
| | | GGACAAGAGCCGGTGGCAGCAGGGCAACGTGTTCAGCT |
| | | GCAGCGTGATGCACGAGGCCCTGCACAACCACTACACC |
| | | CAGAAGTCCCTGAGCCTGAGCCCCGGCGGAGGCGGCGG |
| | | AAGCGGAGGAGGAGGATCCAGAGAGGGCCCTGAGCTGA |
| | | GCCCTGATGATCCTGCCGGACTGCTGGACCTGCGGCAGG |
| | | GAATGTTTGCCCAGCTGGTGGCCCAGAACGTGCTGCTGA |
| | | TCGATGGCCCCCTGTCCTGGTACAGCGATCCTGGACTGG |
| | | CTGGCGTGTCACTGACAGGCGGCCTGAGCTACAAAGAG |
| | | GACACCAAAGAACTGGTGGTGGCCAAGGCCGGCGTGTA |
| | | CTACGTGTTCTTTCAGCTGGAACTGCGGAGAGTGGTGGC |
| | | CGGCGAAGGATCTGGCTCTGTGTCTCTGGCCCTGCATCT |
| | | GCAGCCTCTGAGATCTGCTGCTGGCGCCGCTGCTCTGGC |
| | | ACTGACAGTGGATCTGCCTCCTGCCAGCAGCGAGGCCC |
| | | GGAATAGCGCATTTGGGTTTCAAGGCAGGCTGCTGCACC |
| | | TGTCTGCCGGCCAGAGGCTGGGAGTGCATCTGCACACA |
| | | GAGGCCAGGGCTAGACACGCCTGGCAGCTGACACAGGG |
| | | CGCTACAGTGCTGGGCCTGTTCAGAGTGACCCCCGAGAT |
| | | TCCTGCCGGGCTC |
| 103 | nucleotide | see Table 1 |
| | sequence of anti- | |
| | FAP(4B9) light | |
| | chain | |
| 173 | anti-FAP(4B9) Fc | EVQLLESGGGLVQPGGSLRLSCAASGFTFSSYAMSWVRQA |
| | hole dimeric 4- | PGKGLEWVSAIIGSGASTYYADSVKGRFTISRDNSKNTLYL |
| | 1BB (71-248) | QMNSLRAEDTAVYYCAKGWFGGFNYWGQGTLVTVSSAS |
| | ligand chain | TKGPSVFPLAPSSKSTSGGTAALGCLVKDYFPEPVTVSWNS |
| | | GALTSGVHTFPAVLQSSGLYSLSSVVTVPSSSLGTQTYICN |
| | | VNHKPSNTKVDKKVEPKSCDKTHTCPPCPAPEAAGGPSVF |
| | | LFPPKPKDTLMISRTPEVTCVVVDVSHEDPEVKFNWYVDG |
| | | VEVHNAKTKPREEQYNSTYRVVSVLTVLHQDWLNGKEYK |
| | | CKVSNKALGAPIEKTISKAKGQPREPQVCTLPPSRDELTKN |
| | | QVSLSCAVKGFYPSDIAVEWESNGQPENNYKTTPPVLDSD |
| | | GSFFLVSKLTVDKSRWQQGNVFSCSVMHEALHNHYTQKS |
| | | LSLSPGGGGGSGGGGSREGPELSPDDPAGLLDLRQGMFAQ |
| | | LVAQNVLLIDGPLSWYSDPGLAGVSLTGGLSYKEDTKELV |
| | | VAKAGVYYVFFQLELRRVVAGEGSGSVSLALHLQPLRSAA |
| | | GAAALALTVDLPPASSEARNSAFGFQGRLLHLSAGQRLGV |
| | | HLHTEARARHAWQLTQGATVLGLFRVTPEIPAGLGGGGSG |
| | | GGGSREGPELSPDDPAGLLDLRQGMFAQLVAQNVLLIDGP |
| | | LSWYSDPGLAGVSLTGGLSYKEDTKELVVAKAGVYYVFF |
| | | QLELRRVVAGEGSGSVSLALHLQPLRSAAGAAALALTVDL |
| | | PPASSEARNSAFGFQGRLLHLSAGQRLGVHLHTEARARHA |
| | | WQLTQGATVLGLFRVTPEIPAGL |
| 174 | Fc knob | DKTHTCPPCPAPEAAGGPSVFLFPPKPKDTLMISRTPEVTC |
| | monomeric 41- | VVVDVSHEDPEVKFNWYVDGVEVHNAKTKPREEQYNSTY |
| | BBL (71-248) | RVVSVLTVLHQDWLNGKEYKCKVSNKALGAPIEKTISKAK |
| | | GQPREPQVYTLPPCRDELTKNQVSLWCLVKGFYPSDIAVE |
| | | WESNGQPENNYKTTPPVLDSDGSFFLYSKLTVDKSRWQQ |
| | | GNVFSCSVMHEALHNHYTQKSLSLSPGGGGGSGGGGSRE |
| | | GPELSPDDPAGLLDLRQGMFAQLVAQNVLLIDGPLSWYSD |
| | | PGLAGVSLTGGLSYKEDTKELVVAKAGVYYVFFQLELRRV |
| | | VAGEGSGSVSLALHLQPLRSAAGAAALALTVDLPPASSEA |
| | | RNSAFGFQGRLLHLSAGQRLGVHLHTEARARHAWQLTQG |
| | | ATVLGLFRVTPEIPAGL |
| 106 | anti-FAP(4B9) | see Table 1 |
| | light chain | |

[0772] Table 24 shows the cDNA and amino acid sequences of the monovalent FAP(4B9)-targeted 4-1BB ligand (71-248) trimer-containing Fc (kih) fusion antigen binding molecule (Construct 2.14).

TABLE 24
Sequences of FAP(4B9)-targeted human 4-1BB ligand trimer
containing Fc (kih) fusion molecule Construct 2.14

| SEQ ID | | |
|---|---|---|
| NO: | Description | Sequence |
| 175 | nucleotide | GAGGTGCAGCTGCTCGAAAGCGGCGGAGGACTGGTGCA |
| | sequence of anti- | GCCTGGCGGCAGCCTGAGACTGTCTTGCGCCGCCAGCG |
| | FAP(4B9) Fc | GCTTCACCTTCAGCAGCTACGCCATGAGCTGGGTCCGCC |
| | hole monomeric | AGGCCCCTGGCAAGGGACTGGAATGGGTGTCCGCCATC |
| | 4-1BBL (71-248) | ATCGGCTCTGGCGCCAGCACCTACTACGCCGACAGCGTG |
| | chain | AAGGGCCGGTTCACCATCAGCCGGGACAACAGCAAGAA |
| | | CACCCTGTACCTGCAGATGAACAGCCTGCGGGCCGAGG |
| | | ACACCGCCGTGTACTACTGCGCCAAGGGATGGTTCGGC |
| | | GGCTTCAACTACTGGGGACAGGGCACCCTGGTCACAGT |
| | | GTCCAGCGCTAGCACCAAGGGCCCCTCCGTGTTCCCCCT |
| | | GGCCCCCAGCAGCAAGAGCACCAGCGGCGGCACAGCCG |
| | | CTCTGGGCTGCCTGGTCAAGGACTACTTCCCCGAGCCCG |
| | | TGACCGTGTCCTGGAACAGCGGAGCCCTGACCTCCGGC |
| | | GTGCACACCTTCCCCGCCGTGCTGCAGAGTTCTGGCCTG |
| | | TATAGCCTGAGCAGCGTGGTCACCGTGCCTTCTAGCAGC |
| | | CTGGGCACCCAGACCTACATCTGCAACGTGAACCACAA |
| | | GCCCAGCAACACCAAGGTGGACAAGAAGGTGGAGCCCA |
| | | AGAGCTGCGACAAAACTCACACATGCCCACCGTGCCCA |
| | | GCACCTGAAGCTGCAGGGGGACCGTCAGTCTTCCTCTTC |
| | | CCCCCAAAACCCAAGGACACCCTCATGATCTCCCGGACC |
| | | CCTGAGGTCACATGCGTGGTGGTGGACGTGAGCCACGA |
| | | AGACCCTGAGGTCAAGTTCAACTGGTACGTGGACGGCG |
| | | TGGAGGTGCATAATGCCAAGACAAAGCCGCGGGAGGAG |
| | | CAGTACAACAGCACGTACCGTGTGGTCAGCGTCCTCACC |
| | | GTCCTGCACCAGGACTGGCTGAATGGCAAGGAGTACAA |
| | | GTGCAAGGTCTCCAACAAAGCCCTCGGCGCCCCCATCG |
| | | AGAAAACCATCTCCAAAGCCAAAGGGCAGCCCCGAGAA |
| | | CCACAGGTGTGCACCCTGCCCCCATCCCGGGATGAGCTG |
| | | ACCAAGAACCAGGTCAGCCTCTCGTGCGCAGTCAAAGG |
| | | CTTCTATCCCAGCGACATCGCCGTGGAGTGGGAGAGCA |
| | | ATGGGCAGCCGGAGAACAACTACAAGACCACGCCTCCC |
| | | GTGCTGGACTCCGACGGCTCCTTCTTCCTCGTGAGCAAG |
| | | CTCACCGTGGACAAGAGCAGGTGGCAGCAGGGGAACGT |
| | | CTTCTCATGCTCCGTGATGCATGAGGCTCTGCACAACCA |
| | | CTACACGCAGAAGAGCCTCTCCCTGTCTCCGGGTGGAGG |
| | | CGGCGGAAGCGGAGGAGGAGGATCCAGAGAGGGCCCT |
| | | GAGCTGAGCCCTGATGATCCTGCCGGACTGCTGGACCTG |
| | | CGGCAGGGAATGTTTGCCCAGCTGGTGGCCCAGAACGT |
| | | GCTGCTGATCGATGGCCCCCTGTCCTGGTACAGCGATCC |
| | | TGGACTGGCTGGCGTGTCACTGACAGGCGGCCTGAGCTA |
| | | CAAAGAGGACACCAAAGAACTGGTGGTGGCCAAGGCCG |
| | | GCGTGTACTACGTGTTCTTTCAGCTGGAACTGCGGAGAG |
| | | TGGTGGCCGGCGAAGGATCTGGCTCTGTGTCTCTGGCCC |
| | | TGCATCTGCAGCCTCTGAGATCTGCTGCTGGCGCCGCTG |
| | | CTCTGGCACTGACAGTGGATCTGCCTCCTGCCAGCAGCG |
| | | AGGCCCGGAATAGCGCATTTGGGTTTCAAGGCAGGCTG |
| | | CTGCACCTGTCTGCCGGCCAGAGGCTGGGAGTGCATCTG |
| | | CACACAGAGGCCAGGGCTAGACACGCCTGGCAGCTGAC |
| | | ACAGGGCGCTACAGTGCTGGGCCTGTTCAGAGTGACCC |
| | | CCGAGATTCCTGCCGGGCTC |
| 176 | nucleotide | GACAAAACTCACACATGCCCACCGTGCCCAGCACCTGA |
| | sequence of Fc | AGCTGCAGGGGGACCGTCAGTCTTCCTCTTCCCCCCAAA |
| | knob dimeric 4- | ACCCAAGGACACCCTCATGATCTCCCGGACCCCTGAGGT |
| | 1BB ligand (71- | CACATGCGTGGTGGTGGACGTGAGCCACGAAGACCCTG |
| | 248) | AGGTCAAGTTCAACTGGTACGTGGACGGCGTGGAGGTG |
| | | CATAATGCCAAGACAAAGCCGCGGGAGGAGCAGTACAA |
| | | CAGCACGTACCGTGTGGTCAGCGTCCTCACCGTCCTGCA |
| | | CCAGGACTGGCTGAATGGCAAGGAGTACAAGTGCAAGG |
| | | TCTCCAACAAAGCCCTCGGCGCCCCCATCGAGAAAACC |
| | | ATCTCCAAAGCCAAAGGGCAGCCCCGAGAACCACAGGT |
| | | GTACACCCTGCCCCCCTGCAGAGATGAGCTGACCAAGA |
| | | ACCAGGTGTCCCTGTGGTGTCTGGTCAAGGGCTTCTACC |
| | | CCAGCGATATCGCCGTGGAGTGGGAGAGCAACGGCCAG |
| | | CCTGAGAACAACTACAAGACCACCCCCCCTGTGCTGGA |
| | | CAGCGACGGCAGCTTCTTCCTGTACTCCAAACTGACCGT |
| | | GGACAAGAGCCGGTGGCAGCAGGGCAACGTGTTCAGCT |
| | | GCAGCGTGATGCACGAGGCCCTGCACAACCACTACACC |
| | | CAGAAGTCCCTGAGCCTGAGCCCCGGCGGAGGCGGCGG |
| | | AAGCGGAGGAGGAGGATCCAGAGAGGGCCCTGAGCTGA |
| | | GCCCTGATGATCCTGCCGGACTGCTGGACCTGCGGCAGG |
| | | GAATGTTTGCCCAGCTGGTGGCCCAGAACGTGCTGCTGA |
| | | TCGATGGCCCCCTGTCCTGGTACAGCGATCCTGGACTGG |
| | | CTGGCGTGTCACTGACAGGCGGCCTGAGCTACAAAGAG |
| | | GACACCAAAGAACTGGTGGTGGCCAAGGCCGGCGTGTA |
| | | CTACGTGTTCTTTCAGCTGGAACTGCGGAGAGTGGTGGC |
| | | CGGCGAAGGATCTGGCTCTGTGTCTCTGGCCCTGCATCT |
| | | GCAGCCTCTGAGATCTGCTGCTGGCGCCGCTGCTCTGGC |
| | | ACTGACAGTGGATCTGCCTCCTGCCAGCAGCGAGGCCC |
| | | GGAATAGCGCATTTGGGTTTCAAGGCAGGCTGCTGCACC |
| | | TGTCTGCCGGCCAGAGGCTGGGAGTGCATCTGCACACA |
| | | GAGGCCAGGGCTAGACACGCCTGGCAGCTGACACAGGG |
| | | CGCTACAGTGCTGGGCCTGTTCAGAGTGACCCCCGAGAT |
| | | TCCAGCAGGCCTGGGAGGCGGCGGATCTGGCGGCGGAG |
| | | GATCTAGAGAAGGACCCGAGCTGTCCCCCGACGATCCC |
| | | GCTGGGCTGCTGGATCTGAGACAGGGCATGTTCGCTCAG |
| | | CTGGTGGCTCAGAATGTGCTGCTGATTGACGGACCTCTG |
| | | AGCTGGTACTCCGACCCAGGGCTGGCAGGGGTGTCCCT |
| | | GACTGGGGGACTGTCCTACAAAGAAGATACAAAAGAAC |
| | | TGGTGGTGGCTAAAGCTGGGGTGTACTATGTGTTTTTTC |
| | | AGCTGGAACTGAGGCGGGTGGTGGCTGGGGAGGGCTCA |
| | | GGATCTGTGTCCCTGGCTCTGCATCTGCAGCCACTGCGC |
| | | TCTGCAGCAGGGGCTGCAGCACTGGCCCTGACTGTGGA |
| | | CCTGCCCCCAGCTTCTTCCGAGGCCAGAAACAGCGCCTT |
| | | CGGGTTCCAAGGACGCCTGCTGCATCTGAGCGCCGGAC |
| | | AGCGCCTGGGAGTGCATCTGCATACTGAAGCCAGAGCC |
| | | CGGCATGCTTGGCAGCTGACTCAGGGGGCAACTGTGCTG |
| | | GGACTGTTTCGCGTGACACCTGAGATCCCAGCCGGGCTC |
| 103 | nucleotide | See Table 1 |
| | sequence of anti- | |
| | FAP(4B9) light | |
| | chain | |
| 177 | anti-FAP(4B9) Fc | EVQLLESGGGLVQPGGSLRLSCAASGFTFSSYAMSWVRQA |
| | hole monomeric | PGKGLEWVSAIIGSGASTYYADSVKGRFTISRDNSKNTLYL |
| | 4-1BB ligand (71- | QMNSLRAEDTAVYYCAKGWFGGFNYWGQGTLVTVSSAS |
| | 248) chain | TKGPSVFPLAPSSKSTSGGTAALGCLVKDYFPEPVTVSWNS |
| | | GALTSGVHTFPAVLQSSGLYSLSSVVTVPSSSLGTQTYICN |
| | | VNHKPSNTKVDKKVEPKSCDKTHTCPPCPAPEAAGGPSVF |
| | | LFPPKPKDTLMISRTPEVTCVVVDVSHEDPEVKFNWYVDG |
| | | VEVHNAKTKPREEQYNSTYRVVSVLTVLHQDWLNGKEYK |
| | | CKVSNKALGAPIEKTISKAKGQPREPQVCTLPPSRDELTKN |
| | | QVSLSCAVKGFYPSDIAVEWESNGQPENNYKTTPPVLDSD |
| | | GSFFLVSKLTVDKSRWQQGNVFSCSVMHEALHNHYTQKS |
| | | LSLSPGGGGGSGGGGSREGPELSPDDPAGLLDLRQGMFAQ |
| | | LVAQNVLLIDGPLSWYSDPGLAGVSLTGGLSYKEDTKELV |
| | | VAKAGVYYVFFQLELRRVVAGEGSGSVSLALHLQPLRSAA |
| | | GAAALALTVDLPPASSEARNSAFGFQGRLLHLSAGQRLGV |
| | | HLHTEARARHAWQLTQGATVLGLFRVTPEIPAGL |
| 178 | Fc knob dimeric | DKTHTCPPCPAPEAAGGPSVFLFPPKPKDTLMISRTPEVTC |
| | 4-1BB ligand (71- | VVVDVSHEDPEVKFNWYVDGVEVHNAKTKPREEQYNSTY |
| | 248) | RVVSVLTVLHQDWLNGKEYKCKVSNKALGAPIEKTISKAK |
| | | GQPREPQVYTLPPCRDELTKNQVSLWCLVKGFYPSDIAVE |
| | | WESNGQPENNYKTTPPVLDSDGSFFLYSKLTVDKSRWQQ |
| | | GNVFSCSVMHEALHNHYTQKSLSLSPGGGGGSGGGGSRE |
| | | GPELSPDDPAGLLDLRQGMFAQLVAQNVLLIDGPLSWYSD |
| | | PGLAGVSLTGGLSYKEDTKELVVAKAGVYYVFFQLELRRV |
| | | VAGEGSGSVSLALHLQPLRSAAGAAALALTVDLPPASSEA |
| | | RNSAFGFQGRLLHLSAGQRLGVHLHTEARARHAWQLTQG |
| | | ATVLGLFRVTPEIPAGLGGGGSGGGGSREGPELSPDDPAGL |
| | | LDLRQGMFAQLVAQNVLLIDGPLSWYSDPGLAGVSLTGGL |
| | | SYKEDTKELVVAKAGVYYVFFQLELRRVVAGEGSGSVSL |
| | | ALHLQPLRSAAGAAALALTVDLPPASSEARNSAFGFQGRL |
| | | LHLSAGQRLGVHLHTEARARHAWQLTQGATVLGLFRVTP |
| | | EIPAGL |
| 106 | anti-FAP(4B9) | See Table 1 |
| | light chain | |

[0773] Table 25 shows the cDNA and amino acid sequences of the monovalent FAP(28H1)-targeted 4-1BB ligand trimer-containing Fc (kih) fusion antigen binding molecule (Construct 1.13).

TABLE 25
Sequences of FAP(28H1)-targeted human 4-1BB ligand trimer
containing Fc (kih) fusion molecule Construct 1.13

| SEQ ID NO: | Description | Sequence |
|---|---|---|
| 179 | nucleotide | GAAGTGCAGCTGCTGGAATCCGGCGGAGGCCTGGTGCA |
| | sequence of anti- | GCCTGGCGGATCTCTGAGACTGTCCTGCGCCGCCTCCGG |
| | FAP(28H1) Fc | CTTCACCTTCTCCTCCCACGCCATGTCCTGGGTCCGACA |
| | hole dimeric 4- | GGCTCCTGGCAAAGGCCTGGAATGGGTGTCCGCCATCTG |
| | 1BB ligand (71- | GGCCTCCGGCGAGCAGTACTACGCCGACTCTGTGAAGG |
| | 248) chain | GCCGGTTCACCATCTCCCGGGACAACTCCAAGAACACCC |
| | | TGTACCTGCAGATGAACTCCCTGCGGGCCGAGGACACC |
| | | GCCGTGTACTACTGTGCCAAGGGCTGGCTGGGCAACTTC |
| | | GACTACTGGGGACAGGGCACCCTGGTCACCGTGTCCAG |
| | | CGCTAGCACCAAGGGCCCCTCCGTGTTCCCCCTGGCCCC |
| | | CAGCAGCAAGAGCACCAGCGGCGGCACAGCCGCTCTGG |
| | | GCTGCCTGGTCAAGGACTACTTCCCCGAGCCCGTGACCG |
| | | TGTCCTGGAACAGCGGAGCCCTGACCTCCGGCGTGCAC |
| | | ACCTTCCCCGCCGTGCTGCAGAGTTCTGGCCTGTATAGC |
| | | CTGAGCAGCGTGGTCACCGTGCCTTCTAGCAGCCTGGGC |
| | | ACCCAGACCTACATCTGCAACGTGAACCACAAGCCCAG |
| | | CAACACCAAGGTGGACAAGAAGGTGGAGCCCAAGAGCT |
| | | GCGACAAAACTCACACATGCCCACCGTGCCCAGCACCT |
| | | GAAGCTGCAGGGGGACCGTCAGTCTTCCTCTTCCCCCCA |
| | | AAACCCAAGGACACCCTCATGATCTCCCGGACCCCTGA |
| | | GGTCACATGCGTGGTGGTGGACGTGAGCCACGAAGACC |
| | | CTGAGGTCAAGTTCAACTGGTACGTGGACGGCGTGGAG |
| | | GTGCATAATGCCAAGACAAAGCCGCGGGAGGAGCAGTA |
| | | CAACAGCACGTACCGTGTGGTCAGCGTCCTCACCGTCCT |
| | | GCACCAGGACTGGCTGAATGGCAAGGAGTACAAGTGCA |
| | | AGGTCTCCAACAAAGCCCTCGGCGCCCCCATCGAGAAA |
| | | ACCATCTCCAAAGCCAAAGGGCAGCCCCGAGAACCACA |
| | | GGTGTGCACCCTGCCCCCATCCCGGGATGAGCTGACCAA |
| | | GAACCAGGTCAGCCTCTCGTGCGCAGTCAAAGGCTTCTA |
| | | TCCCAGCGACATCGCCGTGGAGTGGGAGAGCAATGGGC |
| | | AGCCGGAGAACAACTACAAGACCACGCCTCCCGTGCTG |
| | | GACTCCGACGGCTCCTTCTTCCTCGTGAGCAAGCTCACC |
| | | GTGGACAAGAGCAGGTGGCAGCAGGGGAACGTCTTCTC |
| | | ATGCTCCGTGATGCATGAGGCTCTGCACAACCACTACAC |
| | | GCAGAAGAGCCTCTCCCTGTCTCCGGGTGGAGGCGGCG |
| | | GAAGCGGAGGAGGAGGATCCAGAGAGGGCCCTGAGCTG |
| | | AGCCCTGATGATCCTGCCGGACTGCTGGACCTGCGGCAG |
| | | GGAATGTTTGCCCAGCTGGTGGCCCAGAACGTGCTGCTG |
| | | ATCGATGGCCCCCTGTCCTGGTACAGCGATCCTGGACTG |
| | | GCTGGCGTGTCACTGACAGGCGGCCTGAGCTACAAAGA |
| | | GGACACCAAAGAACTGGTGGTGGCCAAGGCCGGCGTGT |
| | | ACTACGTGTTCTTTCAGCTGGAACTGCGGAGAGTGGTGG |
| | | CCGGCGAAGGATCTGGCTCTGTGTCTCTGGCCCTGCATC |
| | | TGCAGCCTCTGAGATCTGCTGCTGGCGCCGCTGCTCTGG |
| | | CACTGACAGTGGATCTGCCTCCTGCCAGCAGCGAGGCCC |
| | | GGAATAGCGCATTTGGGTTTCAAGGCAGGCTGCTGCACC |
| | | TGTCTGCCGGCCAGAGGCTGGGAGTGCATCTGCACACA |
| | | GAGGCCAGGGCTAGACACGCCTGGCAGCTGACACAGGG |
| | | CGCTACAGTGCTGGGCCTGTTCAGAGTGACCCCCGAGAT |
| | | TCCAGCAGGCCTGGGAGGCGGCGGATCTGGCGGCGGAG |
| | | GATCTAGAGAAGGACCCGAGCTGTCCCCCGACGATCCC |
| | | GCTGGGCTGCTGGATCTGAGACAGGGCATGTTCGCTCAG |
| | | CTGGTGGCTCAGAATGTGCTGCTGATTGACGGACCTCTG |
| | | AGCTGGTACTCCGACCCAGGGCTGGCAGGGGTGTCCCT |
| | | GACTGGGGGACTGTCCTACAAAGAAGATACAAAAGAAC |
| | | TGGTGGTGGCTAAAGCTGGGGTGTACTATGTGTTTTTTC |
| | | AGCTGGAACTGAGGCGGGTGGTGGCTGGGGAGGGCTCA |
| | | GGATCTGTGTCCCTGGCTCTGCATCTGCAGCCACTGCGC |
| | | TCTGCAGCAGGGGCTGCAGCACTGGCCCTGACTGTGGA |
| | | CCTGCCCCCAGCTTCTTCCGAGGCCAGAAACAGCGCCTT |
| | | CGGGTTCCAAGGACGCCTGCTGCATCTGAGCGCCGGAC |
| | | AGCGCCTGGGAGTGCATCTGCATACTGAAGCCAGAGCC |
| | | CGGCATGCTTGGCAGCTGACTCAGGGGGCAACTGTGCTG |
| | | GGACTGTTTCGCGTGACACCTGAGATCCCAGCCGGGCTC |
| 172 | nucleotide | see Table 23 |
| | sequence of Fc | |
| | knob monomeric | |
| | 4-1BB ligand (71- | |
| | 248) | |
| 112 | nucleotide | see Table 3 |
| | sequence of anti- | |
| | FAP(28H1) light | |
| | chain | |
| 180 | anti-FAP(28H1) | EVQLLESGGGLVQPGGSLRLSCAASGFTFSSHAMSWVRQA |
| | Fc hole dimeric 4- | PGKGLEWVSAIWASGEQYYADSVKGRFTISRDNSKNTLYL |
| | 1BB ligand (71- | QMNSLRAEDTAVYYCAKGWLGNFDYWGQGTLVTVSSAS |
| | 248) chain | TKGPSVFPLAPSSKSTSGGTAALGCLVKDYFPEPVTVSWNS |
| | | GALTSGVHTFPAVLQSSGLYSLSSVVTVPSSSLGTQTYICN |
| | | VNHKPSNTKVDKKVEPKSCDKTHTCPPCPAPEAAGGPSVF |
| | | LFPPKPKDTLMISRTPEVTCVVVDVSHEDPEVKFNWYVDG |
| | | VEVHNAKTKPREEQYNSTYRVVSVLTVLHQDWLNGKEYK |
| | | CKVSNKALGAPIEKTISKAKGQPREPQVCTLPPSRDELTKN |
| | | QVSLSCAVKGFYPSDIAVEWESNGQPENNYKTTPPVLDSD |
| | | GSFFLVSKLTVDKSRWQQGNVFSCSVMHEALHNHYTQKS |
| | | LSLSPGGGGGSGGGGSREGPELSPDDPAGLLDLRQGMFAQ |
| | | LVAQNVLLIDGPLSWYSDPGLAGVSLTGGLSYKEDTKELV |
| | | VAKAGVYYVFFQLELRRVVAGEGSGSVSLALHLQPLRSAA |
| | | GAAALALTVDLPPASSEARNSAFGFQGRLLHLSAGQRLGV |
| | | HLHTEARARHAWQLTQGATVLGLFRVTPEIPAGLGGGGSG |
| | | GGGSREGPELSPDDPAGLLDLRQGMFAQLVAQNVLLIDGP |
| | | LSWYSDPGLAGVSLTGGLSYKEDTKELVVAKAGVYYVFF |
| | | QLELRRVVAGEGSGSVSLALHLQPLRSAAGAAALALTVDL |
| | | PPASSEARNSAFGFQGRLLHLSAGQRLGVHLHTEARARHA |
| | | WQLTQGATVLGLFRVTPEIPAGL |
| 174 | Fc knob | see Table 23 |
| | monomeric 4- | |
| | 1BB ligand (71- | |
| | 248) | |
| 114 | anti-FAP(28H1) | see Table 3 |
| | light chain | |

[0774] Table 26 shows the cDNA and amino acid sequences of the monovalent FAP(28H1)-targeted 4-1BB ligand trimer-containing Fc (kih) fusion antigen binding molecule (Construct 1.14).

TABLE 26
Sequences of FAP(28H1)-targeted human 4-1BB ligand trimer
containing Fc (kih) fusion molecule Construct 1.14

| SEQ ID NO: | Description | Sequence |
|---|---|---|
| 181 | nucleotide | GAAGTGCAGCTGCTGGAATCCGGCGGAGGCCTGGTGCA |
| | sequence of anti- | GCCTGGCGGATCTCTGAGACTGTCCTGCGCCGCCTCCGG |
| | FAP(28H1) Fc | CTTCACCTTCTCCTCCCACGCCATGTCCTGGGTCCGACA |
| | hole monomeric | GGCTCCTGGCAAAGGCCTGGAATGGGTGTCCGCCATCTG |
| | 4-1BB ligand (71- | GGCCTCCGGCGAGCAGTACTACGCCGACTCTGTGAAGG |
| | 248) chain | GCCGGTTCACCATCTCCCGGGACAACTCCAAGAACACCC |
| | | TGTACCTGCAGATGAACTCCCTGCGGGCCGAGGACACC |
| | | GCCGTGTACTACTGTGCCAAGGGCTGGCTGGGCAACTTC |
| | | GACTACTGGGGACAGGGCACCCTGGTCACCGTGTCCAG |
| | | CGCTAGCACCAAGGGCCCCTCCGTGTTCCCCCTGGCCCC |
| | | CAGCAGCAAGAGCACCAGCGGCGGCACAGCCGCTCTGG |
| | | GCTGCCTGGTCAAGGACTACTTCCCCGAGCCCGTGACCG |
| | | TGTCCTGGAACAGCGGAGCCCTGACCTCCGGCGTGCAC |
| | | ACCTTCCCCGCCGTGCTGCAGAGTTCTGGCCTGTATAGC |
| | | CTGAGCAGCGTGGTCACCGTGCCTTCTAGCAGCCTGGGC |
| | | ACCCAGACCTACATCTGCAACGTGAACCACAAGCCCAG |
| | | CAACACCAAGGTGGACAAGAAGGTGGAGCCCAAGAGCT |
| | | GCGACAAAACTCACACATGCCCACCGTGCCCAGCACCT |
| | | GAAGCTGCAGGGGGACCGTCAGTCTTCCTCTTCCCCCCA |
| | | AAACCCAAGGACACCCTCATGATCTCCCGGACCCCTGA |
| | | GGTCACATGCGTGGTGGTGGACGTGAGCCACGAAGACC |
| | | CTGAGGTCAAGTTCAACTGGTACGTGGACGGCGTGGAG |
| | | GTGCATAATGCCAAGACAAAGCCGCGGGAGGAGCAGTA |
| | | CAACAGCACGTACCGTGTGGTCAGCGTCCTCACCGTCCT |
| | | GCACCAGGACTGGCTGAATGGCAAGGAGTACAAGTGCA |
| | | AGGTCTCCAACAAAGCCCTCGGCGCCCCCATCGAGAAA |
| | | ACCATCTCCAAAGCCAAAGGGCAGCCCCGAGAACCACA |
| | | GGTGTGCACCCTGCCCCCATCCCGGGATGAGCTGACCAA |
| | | GAACCAGGTCAGCCTCTCGTGCGCAGTCAAAGGCTTCTA |
| | | TCCCAGCGACATCGCCGTGGAGTGGGAGAGCAATGGGC |
| | | AGCCGGAGAACAACTACAAGACCACGCCTCCCGTGCTG |
| | | GACTCCGACGGCTCCTTCTTCCTCGTGAGCAAGCTCACC |
| | | GTGGACAAGAGCAGGTGGCAGCAGGGGAACGTCTTCTC |
| | | ATGCTCCGTGATGCATGAGGCTCTGCACAACCACTACAC |
| | | GCAGAAGAGCCTCTCCCTGTCTCCGGGTGGAGGCGGCG |
| | | GAAGCGGAGGAGGAGGATCCAGAGAGGGCCCTGAGCTG |
| | | AGCCCTGATGATCCTGCCGGACTGCTGGACCTGCGGCAG |
| | | GGAATGTTTGCCCAGCTGGTGGCCCAGAACGTGCTGCTG |
| | | ATCGATGGCCCCCTGTCCTGGTACAGCGATCCTGGACTG |
| | | GCTGGCGTGTCACTGACAGGCGGCCTGAGCTACAAAGA |
| | | GGACACCAAAGAACTGGTGGTGGCCAAGGCCGGCGTGT |
| | | ACTACGTGTTCTTTCAGCTGGAACTGCGGAGAGTGGTGG |
| | | CCGGCGAAGGATCTGGCTCTGTGTCTCTGGCCCTGCATC |
| | | TGCAGCCTCTGAGATCTGCTGCTGGCGCCGCTGCTCTGG |
| | | CACTGACAGTGGATCTGCCTCCTGCCAGCAGCGAGGCCC |
| | | GGAATAGCGCATTTGGGTTTCAAGGCAGGCTGCTGCACC |
| | | TGTCTGCCGGCCAGAGGCTGGGAGTGCATCTGCACACA |
| | | GAGGCCAGGGCTAGACACGCCTGGCAGCTGACACAGGG |
| | | CGCTACAGTGCTGGGCCTGTTCAGAGTGACCCCCGAGAT |
| | | TCCTGCCGGGCTC |
| 176 | nucleotide | see Table 24 |
| | sequence of Fc | |
| | knob dimeric 4- | |
| | 1BBL (71-248) | |
| 112 | nucleotide | See Table 3 |
| | sequence of anti- | |
| | FAP(28H1) light | |
| | chain | |
| 182 | anti-FAP(28H1) | EVQLLESGGGLVQPGGSLRLSCAASGFTFSSHAMSWVRQA |
| | Fc hole | PGKGLEWVSAIWASGEQYYADSVKGRFTISRDNSKNTLYL |
| | monomeric 4- | QMNSLRAEDTAVYYCAKGWLGNFDYWGQGTLVTVSSAS |
| | 1BBL (71-248) | TKGPSVFPLAPSSKSTSGGTAALGCLVKDYFPEPVTVSWNS |
| | chain | GALTSGVHTFPAVLQSSGLYSLSSVVTVPSSSLGTQTYICN |
| | | VNHKPSNTKVDKKVEPKSCDKTHTCPPCPAPEAAGGPSVF |
| | | LFPPKPKDTLMISRTPEVTCVVVDVSHEDPEVKFNWYVDG |
| | | VEVHNAKTKPREEQYNSTYRVVSVLTVLHQDWLNGKEYK |
| | | CKVSNKALGAPIEKTISKAKGQPREPQVCTLPPSRDELTKN |
| | | QVSLSCAVKGFYPSDIAVEWESNGQPENNYKTTPPVLDSD |
| | | GSFFLVSKLTVDKSRWQQGNVFSCSVMHEALHNHYTQKS |
| | | LSLSPGGGGGSGGGGSREGPELSPDDPAGLLDLRQGMFAQ |
| | | LVAQNVLLIDGPLSWYSDPGLAGVSLTGGLSYKEDTKELV |
| | | VAKAGVYYVFFQLELRRVVAGEGSGSVSLALHLQPLRSAA |
| | | GAAALALTVDLPPASSEARNSAFGFQGRLLHLSAGQRLGV |
| | | HLHTEARARHAWQLTQGATVLGLFRVTPEIPAGL |
| 178 | Fc knob dimeric | see Table 24 |
| | 4-1BB ligand (71- | |
| | 248) | |
| 114 | anti-FAP(28H1) | See Table 3 |
| | light chain | |

[0775] 1.8 Preparation of Monovalent CD19-Targeted 4-1BB Ligand Trimer-Containing Fc (kih) Fusion Antigen Binding Molecule, wherein the 4-1BB Ligands are C-Terminally Fused (Constructs 3.13, 4.13, 3.14 and 4.14) (CD19 on the Hole Chain)

[0776] The molecules are prepared as described in Example 1.7 for the monovalent FAP-targeted 4-1BB ligand trimer-containing Fc (kih) fusion antigen binding molecules, with the only difference that the anti-FAP binder was replaced by an anti-CD19 binder.

[0777] The variable region of heavy and light chain DNA sequences encoding a binder specific for CD19, clone 8B8-018 or 8B8-2B11, are subcloned in frame with either the constant heavy chain of the hole or the constant light chain of human IgG1.

[0778] Combination of the anti-CD19 huIgG1 Fc hole chain containing the Y349C/T366S/L368A/Y407V mutations, the huIgG1 knob chain containing the S354C/T366W mutations and the anti-CD19 light chain allows generation of a heterodimer, which includes an assembled trimeric 4-1BB ligand and one CD19 binding Fab (FIGS. 2C or 2D).

[0779] Table 27 shows, respectively, the cDNA and amino acid sequences of the monovalent targeted CD19(8B8-018) split trimeric 4-1BB ligand (71-248) C-terminal Fc (kih) fusion antigen binding molecule (construct 3.13).

TABLE 27
Sequences of CD19(8B8-018)-targeted human 4-1BB ligand trimer
containing Fc (kih) fusion molecule Construct 3.13

| SEQ ID NO: | Description | Sequence |
|---|---|---|
| 183 | nucleotide | CAGGTCCAGCTGGTGCAGTCCGGCGCCGAGGTCAAGAA |
| | sequence of anti- | ACCCGGGGCTTCTGTGAAGGTTTCATGCAAGGCAAGCG |
| | CD19(8B8-018) | GATACACCTTCACCGACTATATCATGCATTGGGTCAGGC |
| | Fc hole dimeric 4- | AGGCCCCTGGCCAAGGTCTCGAATGGATGGGCTACATTA |
| | 1BB ligand (71- | ACCCATATAATGATGGCTCCAAATACACCGAGAAGTTTC |
| | 248) chain | AGGGAAGAGTCACTATGACATCTGACACCAGTATCAGC |
| | | ACTGCTTACATGGAGCTGTCCCGCCTTCGGTCTGATGAC |
| | | ACCGCAGTGTATTACTGTGCCAGGGGCACATATTACTAC |
| | | GGCTCAGCTCTGTTCGACTATTGGGGGCAGGGAACCACA |
| | | GTAACCGTGAGCTCCGCTAGCACCAAGGGCCCCTCCGTG |
| | | TTCCCCCTGGCCCCCAGCAGCAAGAGCACCAGCGGCGG |
| | | CACAGCCGCTCTGGGCTGCCTGGTCAAGGACTACTTCCC |
| | | CGAGCCCGTGACCGTGTCCTGGAACAGCGGAGCCCTGA |
| | | CCTCCGGCGTGCACACCTTCCCCGCCGTGCTGCAGAGTT |
| | | CTGGCCTGTATAGCCTGAGCAGCGTGGTCACCGTGCCTT |
| | | CTAGCAGCCTGGGCACCCAGACCTACATCTGCAACGTG |
| | | AACCACAAGCCCAGCAACACCAAGGTGGACAAGAAGGT |
| | | GGAGCCCAAGAGCTGCGACAAAACTCACACATGCCCAC |
| | | CGTGCCCAGCACCTGAAGCTGCAGGGGGACCGTCAGTC |
| | | TTCCTCTTCCCCCCAAAACCCAAGGACACCCTCATGATC |
| | | TCCCGGACCCCTGAGGTCACATGCGTGGTGGTGGACGTG |
| | | AGCCACGAAGACCCTGAGGTCAAGTTCAACTGGTACGT |
| | | GGACGGCGTGGAGGTGCATAATGCCAAGACAAAGCCGC |
| | | GGGAGGAGCAGTACAACAGCACGTACCGTGTGGTCAGC |
| | | GTCCTCACCGTCCTGCACCAGGACTGGCTGAATGGCAAG |
| | | GAGTACAAGTGCAAGGTCTCCAACAAAGCCCTCGGCGC |
| | | CCCCATCGAGAAAACCATCTCCAAAGCCAAAGGGCAGC |
| | | CCCGAGAACCACAGGTGTGCACCCTGCCCCCATCCCGG |
| | | GATGAGCTGACCAAGAACCAGGTCAGCCTCTCGTGCGC |
| | | AGTCAAAGGCTTCTATCCCAGCGACATCGCCGTGGAGTG |
| | | GGAGAGCAATGGGCAGCCGGAGAACAACTACAAGACC |
| | | ACGCCTCCCGTGCTGGACTCCGACGGCTCCTTCTTCCTC |
| | | GTGAGCAAGCTCACCGTGGACAAGAGCAGGTGGCAGCA |
| | | GGGGAACGTCTTCTCATGCTCCGTGATGCATGAGGCTCT |
| | | GCACAACCACTACACGCAGAAGAGCCTCTCCCTGTCTCC |
| | | GGGTGGAGGCGGCGGAAGCGGAGGAGGAGGATCCAGA |
| | | GAGGGCCCTGAGCTGAGCCCTGATGATCCTGCCGGACT |
| | | GCTGGACCTGCGGCAGGGAATGTTTGCCCAGCTGGTGGC |
| | | CCAGAACGTGCTGCTGATCGATGGCCCCCTGTCCTGGTA |
| | | CAGCGATCCTGGACTGGCTGGCGTGTCACTGACAGGCG |
| | | GCCTGAGCTACAAAGAGGACACCAAAGAACTGGTGGTG |
| | | GCCAAGGCCGGCGTGTACTACGTGTTCTTTCAGCTGGAA |
| | | CTGCGGAGAGTGGTGGCCGGCGAAGGATCTGGCTCTGT |
| | | GTCTCTGGCCCTGCATCTGCAGCCTCTGAGATCTGCTGC |
| | | TGGCGCCGCTGCTCTGGCACTGACAGTGGATCTGCCTCC |
| | | TGCCAGCAGCGAGGCCCGGAATAGCGCATTTGGGTTTCA |
| | | AGGCAGGCTGCTGCACCTGTCTGCCGGCCAGAGGCTGG |
| | | GAGTGCATCTGCACACAGAGGCCAGGGCTAGACACGCC |
| | | TGGCAGCTGACACAGGGCGCTACAGTGCTGGGCCTGTTC |
| | | AGAGTGACCCCCGAGATTCCAGCAGGCCTGGGAGGCGG |
| | | CGGATCTGGCGGCGGAGGATCTAGAGAAGGACCCGAGC |
| | | TGTCCCCCGACGATCCCGCTGGGCTGCTGGATCTGAGAC |
| | | AGGGCATGTTCGCTCAGCTGGTGGCTCAGAATGTGCTGC |
| | | TGATTGACGGACCTCTGAGCTGGTACTCCGACCCAGGGC |
| | | TGGCAGGGGTGTCCCTGACTGGGGGACTGTCCTACAAA |
| | | GAAGATACAAAAGAACTGGTGGTGGCTAAAGCTGGGGT |
| | | GTACTATGTGTTTTTTCAGCTGGAACTGAGGCGGGTGGT |
| | | GGCTGGGGAGGGCTCAGGATCTGTGTCCCTGGCTCTGCA |
| | | TCTGCAGCCACTGCGCTCTGCAGCAGGGGCTGCAGCACT |
| | | GGCCCTGACTGTGGACCTGCCCCCAGCTTCTTCCGAGGC |
| | | CAGAAACAGCGCCTTCGGGTTCCAAGGACGCCTGCTGC |
| | | ATCTGAGCGCCGGACAGCGCCTGGGAGTGCATCTGCAT |
| | | ACTGAAGCCAGAGCCCGGCATGCTTGGCAGCTGACTCA |
| | | GGGGGCAACTGTGCTGGGACTGTTTCGCGTGACACCTGA |
| | | GATCCCAGCCGGGCTC |
| 172 | nucleotide | see Table 23 |
| | sequence of Fc | |
| | knob monomeric | |
| | 4-1BB (71-248) | |
| | ligand | |
| 118 | nucleotide | see Table 5 |
| | sequence of anti- | |
| | CD19(8B8-018) | |
| | light chain | |
| 184 | anti-CD19(8B8- | QVQLVQSGAEVKKPGASVKVSCKASGYTFTDYIMHWVRQ |
| | 018) Fc hole | APGQGLEWMGYINPYNDGSKYTEKFQGRVTMTSDTSISTA |
| | dimeric 4-1BB | YMELSRLRSDDTAVYYCARGTYYYGSALFDYWGQGTTVT |
| | (71-248) ligand | VSSASTKGPSVFPLAPSSKSTSGGTAALGCLVKDYFPEPVT |
| | chain | VSWNSGALTSGVHTFPAVLQSSGLYSLSSVVTVPSSSLGTQ |
| | | TYICNVNHKPSNTKVDKKVEPKSCDKTHTCPPCPAPEAAG |
| | | GPSVFLFPPKPKDTLMISRTPEVTCVVVDVSHEDPEVKFNW |
| | | YVDGVEVHNAKTKPREEQYNSTYRVVSVLTVLHQDWLN |
| | | GKEYKCKVSNKALGAPIEKTISKAKGQPREPQVCTLPPSRD |
| | | ELTKNQVSLSCAVKGFYPSDIAVEWESNGQPENNYKTTPP |
| | | VLDSDGSFFLVSKLTVDKSRWQQGNVFSCSVMHEALHNH |
| | | YTQKSLSLSPGGGGGSGGGGSREGPELSPDDPAGLLDLRQ |
| | | GMFAQLVAQNVLLIDGPLSWYSDPGLAGVSLTGGLSYKED |
| | | TKELVVAKAGVYYVFFQLELRRVVAGEGSGSVSLALHLQP |
| | | LRSAAGAAALALTVDLPPASSEARNSAFGFQGRLLHLSAG |
| | | QRLGVHLHTEARARHAWQLTQGATVLGLFRVTPEIPAGLG |
| | | GGGSGGGGSREGPELSPDDPAGLLDLRQGMFAQLVAQNV |
| | | LLIDGPLSWYSDPGLAGVSLTGGLSYKEDTKELVVAKAGV |
| | | YYVFFQLELRRVVAGEGSGSVSLALHLQPLRSAAGAAALA |
| | | LTVDLPPASSEARNSAFGFQGRLLHLSAGQRLGVHLHTEA |
| | | RARHAWQLTQGATVLGLFRVTPEIPAGL |
| 174 | Fc knob | see Table 23 |
| | monomeric 41- | |
| | BBL (71-248) | |
| 120 | anti-FAP(4B9) | see Table 5 |
| | light chain | |

[0780] Table 28 shows the cDNA and amino acid sequences of the monovalent CD19(8B8-018)-targeted 4-1BB ligand (71-248) trimer-containing Fc (kih) fusion antigen binding molecule (Construct 3.14).

TABLE 28
Sequences of CD19(8B8-018)-targeted human 4-1BB ligand trimer
containing Fc (kih) fusion molecule Construct 3.14

| SEQ ID NO: | Description | Sequence |
|---|---|---|
| 185 | nucleotide | CAGGTCCAGCTGGTGCAGTCCGGCGCCGAGGTCAAGAA |
| | sequence of anti- | ACCCGGGGCTTCTGTGAAGGTTTCATGCAAGGCAAGCG |
| | CD19(8B8-018) | GATACACCTTCACCGACTATATCATGCATTGGGTCAGGC |
| | Fc hole | AGGCCCCTGGCCAAGGTCTCGAATGGATGGGCTACATTA |
| | monomeric 4- | ACCCATATAATGATGGCTCCAAATACACCGAGAAGTTTC |
| | 1BBL (71-248) | AGGGAAGAGTCACTATGACATCTGACACCAGTATCAGC |
| | chain | ACTGCTTACATGGAGCTGTCCCGCCTTCGGTCTGATGAC |
| | | ACCGCAGTGTATTACTGTGCCAGGGGCACATATTACTAC |
| | | GGCTCAGCTCTGTTCGACTATTGGGGGCAGGGAACCACA |
| | | GTAACCGTGAGCTCCGCTAGCACCAAGGGCCCCTCCGTG |
| | | TTCCCCCTGGCCCCCAGCAGCAAGAGCACCAGCGGCGG |
| | | CACAGCCGCTCTGGGCTGCCTGGTCAAGGACTACTTCCC |
| | | CGAGCCCGTGACCGTGTCCTGGAACAGCGGAGCCCTGA |
| | | CCTCCGGCGTGCACACCTTCCCCGCCGTGCTGCAGAGTT |
| | | CTGGCCTGTATAGCCTGAGCAGCGTGGTCACCGTGCCTT |
| | | CTAGCAGCCTGGGCACCCAGACCTACATCTGCAACGTG |
| | | AACCACAAGCCCAGCAACACCAAGGTGGACAAGAAGGT |
| | | GGAGCCCAAGAGCTGCGACAAAACTCACACATGCCCAC |
| | | CGTGCCCAGCACCTGAAGCTGCAGGGGGACCGTCAGTC |
| | | TTCCTCTTCCCCCCAAAACCCAAGGACACCCTCATGATC |
| | | TCCCGGACCCCTGAGGTCACATGCGTGGTGGTGGACGTG |
| | | AGCCACGAAGACCCTGAGGTCAAGTTCAACTGGTACGT |
| | | GGACGGCGTGGAGGTGCATAATGCCAAGACAAAGCCGC |
| | | GGGAGGAGCAGTACAACAGCACGTACCGTGTGGTCAGC |
| | | GTCCTCACCGTCCTGCACCAGGACTGGCTGAATGGCAAG |
| | | GAGTACAAGTGCAAGGTCTCCAACAAAGCCCTCGGCGC |
| | | CCCCATCGAGAAAACCATCTCCAAAGCCAAAGGGCAGC |
| | | CCCGAGAACCACAGGTGTGCACCCTGCCCCCATCCCGG |
| | | GATGAGCTGACCAAGAACCAGGTCAGCCTCTCGTGCGC |
| | | AGTCAAAGGCTTCTATCCCAGCGACATCGCCGTGGAGTG |
| | | GGAGAGCAATGGGCAGCCGGAGAACAACTACAAGACC |
| | | ACGCCTCCCGTGCTGGACTCCGACGGCTCCTTCTTCCTC |
| | | GTGAGCAAGCTCACCGTGGACAAGAGCAGGTGGCAGCA |
| | | GGGGAACGTCTTCTCATGCTCCGTGATGCATGAGGCTCT |
| | | GCACAACCACTACACGCAGAAGAGCCTCTCCCTGTCTCC |
| | | GGGTGGAGGCGGCGGAAGCGGAGGAGGAGGATCCAGA |
| | | GAGGGCCCTGAGCTGAGCCCTGATGATCCTGCCGGACT |
| | | GCTGGACCTGCGGCAGGGAATGTTTGCCCAGCTGGTGGC |
| | | CCAGAACGTGCTGCTGATCGATGGCCCCCTGTCCTGGTA |
| | | CAGCGATCCTGGACTGGCTGGCGTGTCACTGACAGGCG |
| | | GCCTGAGCTACAAAGAGGACACCAAAGAACTGGTGGTG |
| | | GCCAAGGCCGGCGTGTACTACGTGTTCTTTCAGCTGGAA |
| | | CTGCGGAGAGTGGTGGCCGGCGAAGGATCTGGCTCTGT |
| | | GTCTCTGGCCCTGCATCTGCAGCCTCTGAGATCTGCTGC |
| | | TGGCGCCGCTGCTCTGGCACTGACAGTGGATCTGCCTCC |
| | | TGCCAGCAGCGAGGCCCGGAATAGCGCATTTGGGTTTCA |
| | | AGGCAGGCTGCTGCACCTGTCTGCCGGCCAGAGGCTGG |
| | | GAGTGCATCTGCACACAGAGGCCAGGGCTAGACACGCC |
| | | TGGCAGCTGACACAGGGCGCTACAGTGCTGGGCCTGTTC |
| | | AGAGTGACCCCCGAGATTCCTGCCGGGCTC |
| 176 | nucleotide | see Table 24 |
| | sequence of Fc | |
| | knob dimeric 4- | |
| | 1BB ligand (71- | |
| | 248) | |
| 118 | nucleotide | See Table 5 |
| | sequence of anti- | |
| | CD19(8B8-018) | |
| | light chain | |
| 186 | anti-CD19(8B8- | QVQLVQSGAEVKKPGASVKVSCKASGYTFTDYIMHWVRQ |
| | 018) Fc hole | APGQGLEWMGYINPYNDGSKYTEKFQGRVTMTSDTSISTA |
| | monomeric 4- | YMELSRLRSDDTAVYYCARGTYYYGSALFDYWGQGTTVT |
| | 1BB ligand (71- | VSSASTKGPSVFPLAPSSKSTSGGTAALGCLVKDYFPEPVT |
| | 248) chain | VSWNSGALTSGVHTFPAVLQSSGLYSLSSVVTVPSSSLGTQ |
| | | TYICNVNHKPSNTKVDKKVEPKSCDKTHTCPPCPAPEAAG |
| | | GPSVFLFPPKPKDTLMISRTPEVTCVVVDVSHEDPEVKFNW |
| | | YVDGVEVHNAKTKPREEQYNSTYRVVSVLTVLHQDWLN |
| | | GKEYKCKVSNKALGAPIEKTISKAKGQPREPQVCTLPPSRD |
| | | ELTKNQVSLSCAVKGFYPSDIAVEWESNGQPENNYKTTPP |
| | | VLDSDGSFFLVSKLTVDKSRWQQGNVFSCSVMHEALHNH |
| | | YTQKSLSLSPGGGGGSGGGGSREGPELSPDDPAGLLDLRQ |
| | | GMFAQLVAQNVLLIDGPLSWYSDPGLAGVSLTGGLSYKED |
| | | TKELVVAKAGVYYVFFQLELRRVVAGEGSGSVSLALHLQP |
| | | LRSAAGAAALALTVDLPPASSEARNSAFGFQGRLLHLSAG |
| | | QRLGVHLHTEARARHAWQLTQGATVLGLFRVTPEIPAGL |
| 178 | Fc knob dimeric | see Table 24 |
| | 4-1BB ligand (71- | |
| | 248) | |
| 120 | anti-CD19(8B8- | See Table 5 |
| | 018) light chain | |

[0781] Table 29 shows the cDNA and amino acid sequences of the monovalent CD19(8B8-2B11)-targeted 4-1BB ligand trimer-containing Fc (kih) fusion antigen binding molecule (Construct 4.13).

TABLE 29
Sequences of CD19(8B8-2B11)-targeted human 4-1BB ligand trimer
containing Fc (kih) fusion molecule Construct 4.13

| SEQ ID NO: | Description | Sequence |
|---|---|---|
| 187 | nucleotide | CAGGTGCAATTGGTTCAATCTGGTGCTGAAGTAAAAAA |
| | sequence of anti- | ACCGGGCGCTTCCGTTAAAGTGAGCTGCAAAGCATCTGG |
| | CD19(8B8-2B11) | TTACACCTTCACTGACTATATCATGCACTGGGTTCGTCA |
| | Fc hole dimeric 4- | GGCCCCGGGCCAGGGTCTGGAGTGGATGGGCTACATTA |
| | 1BB ligand (71- | ACCCATACAACGACGGTTCCAAATATACCGAGAAATTC |
| | 248) chain | CAGGGCCGCGTCACGATGACCAGCGACACTTCTATCTCC |
| | | ACCGCGTACATGGAACTGTCTAGACTGCGTTCTGACGAC |
| | | ACCGCTGTTTACTATTGTGCACGCGGTACCTACTACTAC |
| | | GGTCCACAGCTGTTTGATTACTGGGGCCAAGGTACCACG |
| | | GTGACCGTAAGCTCTGCTAGCACCAAGGGCCCCTCCGTG |
| | | TTCCCCCTGGCCCCCAGCAGCAAGAGCACCAGCGGCGG |
| | | CACAGCCGCTCTGGGCTGCCTGGTCAAGGACTACTTCCC |
| | | CGAGCCCGTGACCGTGTCCTGGAACAGCGGAGCCCTGA |
| | | CCTCCGGCGTGCACACCTTCCCCGCCGTGCTGCAGAGTT |
| | | CTGGCCTGTATAGCCTGAGCAGCGTGGTCACCGTGCCTT |
| | | CTAGCAGCCTGGGCACCCAGACCTACATCTGCAACGTG |
| | | AACCACAAGCCCAGCAACACCAAGGTGGACAAGAAGGT |
| | | GGAGCCCAAGAGCTGCGACAAAACTCACACATGCCCAC |
| | | CGTGCCCAGCACCTGAAGCTGCAGGGGGACCGTCAGTC |
| | | TTCCTCTTCCCCCCAAAACCCAAGGACACCCTCATGATC |
| | | TCCCGGACCCCTGAGGTCACATGCGTGGTGGTGGACGTG |
| | | AGCCACGAAGACCCTGAGGTCAAGTTCAACTGGTACGT |
| | | GGACGGCGTGGAGGTGCATAATGCCAAGACAAAGCCGC |
| | | GGGAGGAGCAGTACAACAGCACGTACCGTGTGGTCAGC |
| | | GTCCTCACCGTCCTGCACCAGGACTGGCTGAATGGCAAG |
| | | GAGTACAAGTGCAAGGTCTCCAACAAAGCCCTCGGCGC |
| | | CCCCATCGAGAAAACCATCTCCAAAGCCAAAGGGCAGC |
| | | CCCGAGAACCACAGGTGTGCACCCTGCCCCCATCCCGG |
| | | GATGAGCTGACCAAGAACCAGGTCAGCCTCTCGTGCGC |
| | | AGTCAAAGGCTTCTATCCCAGCGACATCGCCGTGGAGTG |
| | | GGAGAGCAATGGGCAGCCGGAGAACAACTACAAGACC |
| | | ACGCCTCCCGTGCTGGACTCCGACGGCTCCTTCTTCCTC |
| | | GTGAGCAAGCTCACCGTGGACAAGAGCAGGTGGCAGCA |
| | | GGGGAACGTCTTCTCATGCTCCGTGATGCATGAGGCTCT |
| | | GCACAACCACTACACGCAGAAGAGCCTCTCCCTGTCTCC |
| | | GGGTGGAGGCGGCGGAAGCGGAGGAGGAGGATCCAGA |
| | | GAGGGCCCTGAGCTGAGCCCTGATGATCCTGCCGGACT |
| | | GCTGGACCTGCGGCAGGGAATGTTTGCCCAGCTGGTGGC |
| | | CCAGAACGTGCTGCTGATCGATGGCCCCCTGTCCTGGTA |
| | | CAGCGATCCTGGACTGGCTGGCGTGTCACTGACAGGCG |
| | | GCCTGAGCTACAAAGAGGACACCAAAGAACTGGTGGTG |
| | | GCCAAGGCCGGCGTGTACTACGTGTTCTTTCAGCTGGAA |
| | | CTGCGGAGAGTGGTGGCCGGCGAAGGATCTGGCTCTGT |
| | | GTCTCTGGCCCTGCATCTGCAGCCTCTGAGATCTGCTGC |
| | | TGGCGCCGCTGCTCTGGCACTGACAGTGGATCTGCCTCC |
| | | TGCCAGCAGCGAGGCCCGGAATAGCGCATTTGGGTTTCA |
| | | AGGCAGGCTGCTGCACCTGTCTGCCGGCCAGAGGCTGG |
| | | GAGTGCATCTGCACACAGAGGCCAGGGCTAGACACGCC |
| | | TGGCAGCTGACACAGGGCGCTACAGTGCTGGGCCTGTTC |
| | | AGAGTGACCCCCGAGATTCCAGCAGGCCTGGGAGGCGG |
| | | CGGATCTGGCGGCGGAGGATCTAGAGAAGGACCCGAGC |
| | | TGTCCCCCGACGATCCCGCTGGGCTGCTGGATCTGAGAC |
| | | AGGGCATGTTCGCTCAGCTGGTGGCTCAGAATGTGCTGC |
| | | TGATTGACGGACCTCTGAGCTGGTACTCCGACCCAGGGC |
| | | TGGCAGGGGTGTCCCTGACTGGGGGACTGTCCTACAAA |
| | | GAAGATACAAAAGAACTGGTGGTGGCTAAAGCTGGGGT |
| | | GTACTATGTGTTTTTTCAGCTGGAACTGAGGCGGGTGGT |
| | | GGCTGGGGAGGGCTCAGGATCTGTGTCCCTGGCTCTGCA |
| | | TCTGCAGCCACTGCGCTCTGCAGCAGGGGCTGCAGCACT |
| | | GGCCCTGACTGTGGACCTGCCCCCAGCTTCTTCCGAGGC |
| | | CAGAAACAGCGCCTTCGGGTTCCAAGGACGCCTGCTGC |
| | | ATCTGAGCGCCGGACAGCGCCTGGGAGTGCATCTGCAT |
| | | ACTGAAGCCAGAGCCCGGCATGCTTGGCAGCTGACTCA |
| | | GGGGGCAACTGTGCTGGGACTGTTTCGCGTGACACCTGA |
| | | GATCCCAGCCGGGCTC |
| 172 | nucleotide | see Table 23 |
| | sequence of Fc | |
| | knob monomeric | |
| | 4-1BB ligand (71- | |
| | 248) | |
| 124 | nucleotide | see Table 7 |
| | sequence of anti- | |
| | CD19(8B8-2B11) | |
| | light chain | |
| 188 | anti-CD19(8B8- | QVQLVQSGAEVKKPGASVKVSCKASGYTFTDYIMHWVRQ |
| | 2B11) Fc hole | APGQGLEWMGYINPYNDGSKYTEKFQGRVTMTSDTSISTA |
| | dimeric 4-1BB | YMELSRLRSDDTAVYYCARGTYYYGPQLFDYWGQGTTVT |
| | ligand (71-248) | VSSASTKGPSVFPLAPSSKSTSGGTAALGCLVKDYFPEPVT |
| | chain | VSWNSGALTSGVHTFPAVLQSSGLYSLSSVVTVPSSSLGTQ |
| | | TYICNVNHKPSNTKVDKKVEPKSCDKTHTCPPCPAPEAAG |
| | | GPSVFLFPPKPKDTLMISRTPEVTCVVVDVSHEDPEVKFNW |
| | | YVDGVEVHNAKTKPREEQYNSTYRVVSVLTVLHQDWLN |
| | | GKEYKCKVSNKALGAPIEKTISKAKGQPREPQVCTLPPSRD |
| | | ELTKNQVSLSCAVKGFYPSDIAVEWESNGQPENNYKTTPP |
| | | VLDSDGSFFLVSKLTVDKSRWQQGNVFSCSVMHEALHNH |
| | | YTQKSLSLSPGGGGGSGGGGSREGPELSPDDPAGLLDLRQ |
| | | GMFAQLVAQNVLLIDGPLSWYSDPGLAGVSLTGGLSYKED |
| | | TKELVVAKAGVYYVFFQLELRRVVAGEGSGSVSLALHLQP |
| | | LRSAAGAAALALTVDLPPASSEARNSAFGFQGRLLHLSAG |
| | | QRLGVHLHTEARARHAWQLTQGATVLGLFRVTPEIPAGLG |
| | | GGGSGGGGSREGPELSPDDPAGLLDLRQGMFAQLVAQNV |
| | | LLIDGPLSWYSDPGLAGVSLTGGLSYKEDTKELVVAKAGV |
| | | YYVFFQLELRRVVAGEGSGSVSLALHLQPLRSAAGAAALA |
| | | LTVDLPPASSEARNSAFGFQGRLLHLSAGQRLGVHLHTEA |
| | | RARHAWQLTQGATVLGLFRVTPEIPAGL |
| 174 | Fc knob | see Table 23 |
| | monomeric 4- | |
| | 1BB ligand (71-248) | |
| 126 | anti-CD19(8B8- | see Table 7 |
| | 2B11) light chain | |

[0782] Table 30 shows the cDNA and amino acid sequences of the monovalent CD19(8B8-2B11)-targeted 4-1BB ligand trimer-containing Fc (kih) fusion antigen binding molecule (Construct 4.14).

TABLE 30
Sequences of CD19(8B8-2B11)-targeted human 4-1BB ligand trimer
containing Fc (kih) fusion molecule Construct 4.14

| SEQ ID NO: | Description | Sequence |
|---|---|---|
| 189 | nucleotide | CAGGTGCAATTGGTTCAATCTGGTGCTGAAGTAAAAAA |
| | sequence of anti- | ACCGGGCGCTTCCGTTAAAGTGAGCTGCAAAGCATCTGG |
| | CD19(8B8-2B11) | TTACACCTTCACTGACTATATCATGCACTGGGTTCGTCA |
| | Fc hole | GGCCCCGGGCCAGGGTCTGGAGTGGATGGGCTACATTA |
| | monomeric 4- | ACCCATACAACGACGGTTCCAAATATACCGAGAAATTC |
| | 1BB ligand (71- | CAGGGCCGCGTCACGATGACCAGCGACACTTCTATCTCC |
| | 248) chain | ACCGCGTACATGGAACTGTCTAGACTGCGTTCTGACGAC |
| | | ACCGCTGTTTACTATTGTGCACGCGGTACCTACTACTAC |
| | | GGTCCACAGCTGTTTGATTACTGGGGCCAAGGTACCACG |
| | | GTGACCGTAAGCTCTGCTAGCACCAAGGGCCCCTCCGTG |
| | | TTCCCCCTGGCCCCCAGCAGCAAGAGCACCAGCGGCGG |
| | | CACAGCCGCTCTGGGCTGCCTGGTCAAGGACTACTTCCC |
| | | CGAGCCCGTGACCGTGTCCTGGAACAGCGGAGCCCTGA |
| | | CCTCCGGCGTGCACACCTTCCCCGCCGTGCTGCAGAGTT |
| | | CTGGCCTGTATAGCCTGAGCAGCGTGGTCACCGTGCCTT |
| | | CTAGCAGCCTGGGCACCCAGACCTACATCTGCAACGTG |
| | | AACCACAAGCCCAGCAACACCAAGGTGGACAAGAAGGT |
| | | GGAGCCCAAGAGCTGCGACAAAACTCACACATGCCCAC |
| | | CGTGCCCAGCACCTGAAGCTGCAGGGGGACCGTCAGTC |
| | | TTCCTCTTCCCCCCAAAACCCAAGGACACCCTCATGATC |
| | | TCCCGGACCCCTGAGGTCACATGCGTGGTGGTGGACGTG |
| | | AGCCACGAAGACCCTGAGGTCAAGTTCAACTGGTACGT |
| | | GGACGGCGTGGAGGTGCATAATGCCAAGACAAAGCCGC |
| | | GGGAGGAGCAGTACAACAGCACGTACCGTGTGGTCAGC |
| | | GTCCTCACCGTCCTGCACCAGGACTGGCTGAATGGCAAG |
| | | GAGTACAAGTGCAAGGTCTCCAACAAAGCCCTCGGCGC |
| | | CCCCATCGAGAAAACCATCTCCAAAGCCAAAGGGCAGC |
| | | CCCGAGAACCACAGGTGTGCACCCTGCCCCCATCCCGG |
| | | GATGAGCTGACCAAGAACCAGGTCAGCCTCTCGTGCGC |
| | | AGTCAAAGGCTTCTATCCCAGCGACATCGCCGTGGAGTG |
| | | GGAGAGCAATGGGCAGCCGGAGAACAACTACAAGACC |
| | | ACGCCTCCCGTGCTGGACTCCGACGGCTCCTTCTTCCTC |
| | | GTGAGCAAGCTCACCGTGGACAAGAGCAGGTGGCAGCA |
| | | GGGGAACGTCTTCTCATGCTCCGTGATGCATGAGGCTCT |
| | | GCACAACCACTACACGCAGAAGAGCCTCTCCCTGTCTCC |
| | | GGGTGGAGGCGGCGGAAGCGGAGGAGGAGGATCCAGA |
| | | GAGGGCCCTGAGCTGAGCCCTGATGATCCTGCCGGACT |
| | | GCTGGACCTGCGGCAGGGAATGTTTGCCCAGCTGGTGGC |
| | | CCAGAACGTGCTGCTGATCGATGGCCCCCTGTCCTGGTA |
| | | CAGCGATCCTGGACTGGCTGGCGTGTCACTGACAGGCG |
| | | GCCTGAGCTACAAAGAGGACACCAAAGAACTGGTGGTG |
| | | GCCAAGGCCGGCGTGTACTACGTGTTCTTTCAGCTGGAA |
| | | CTGCGGAGAGTGGTGGCCGGCGAAGGATCTGGCTCTGT |
| | | GTCTCTGGCCCTGCATCTGCAGCCTCTGAGATCTGCTGC |
| | | TGGCGCCGCTGCTCTGGCACTGACAGTGGATCTGCCTCC |
| | | TGCCAGCAGCGAGGCCCGGAATAGCGCATTTGGGTTTCA |
| | | AGGCAGGCTGCTGCACCTGTCTGCCGGCCAGAGGCTGG |
| | | GAGTGCATCTGCACACAGAGGCCAGGGCTAGACACGCC |
| | | TGGCAGCTGACACAGGGCGCTACAGTGCTGGGCCTGTTC |
| | | AGAGTGACCCCCGAGATTCCTGCCGGGCTC |
| 176 | nucleotide | see Table 24 |
| | sequence of Fc | |
| | knob dimeric 4- | |
| | 1BBL (71-248) | |
| 124 | nucleotide | See Table 7 |
| | sequence of anti- | |
| | CD19(8B8-2B11) | |
| | light chain | |
| 190 | anti-CD19(8B8- | QVQLVQSGAEVKKPGASVKVSCKASGYTFTDYIMHWVRQ |
| | 2B11) Fc hole | APGQGLEWMGYINPYNDGSKYTEKFQGRVTMTSDTSISTA |
| | monomeric 4- | YMELSRLRSDDTAVYYCARGTYYYGPQLFDYWGQGTTVT |
| | 1BBL (71-248) | VSSASTKGPSVFPLAPSSKSTSGGTAALGCLVKDYFPEPVT |
| | chain | VSWNSGALTSGVHTFPAVLQSSGLYSLSSVVTVPSSSLGTQ |
| | | TYICNVNHKPSNTKVDKKVEPKSCDKTHTCPPCPAPEAAG |
| | | GPSVFLFPPKPKDTLMISRTPEVTCVVVDVSHEDPEVKFNW |
| | | YVDGVEVHNAKTKPREEQYNSTYRVVSVLTVLHQDWLN |
| | | GKEYKCKVSNKALGAPIEKTISKAKGQPREPQVCTLPPSRD |
| | | ELTKNQVSLSCAVKGFYPSDIAVEWESNGQPENNYKTTPP |
| | | VLDSDGSFFLVSKLTVDKSRWQQGNVFSCSVMHEALHNH |
| | | YTQKSLSLSPGGGGGSGGGGSREGPELSPDDPAGLLDLRQ |
| | | GMFAQLVAQNVLLIDGPLSWYSDPGLAGVSLTGGLSYKED |
| | | TKELVVAKAGVYYVFFQLELRRVVAGEGSGSVSLALHLQP |
| | | LRSAAGAAALALTVDLPPASSEARNSAFGFQGRLLHLSAG |
| | | QRLGVHLHTEARARHAWQLTQGATVLGLFRVTPEIPAGL |
| 178 | Fc knob dimeric | see Table 24 |
| | 4-1BB ligand (71- | |
| | 248) | |
| 126 | anti-CD19(8B8- | See Table 7 |
| | 2B11) light chain | |

[0783] 1.9 Preparation of Monovalent CEA-Targeted 4-1BB Ligand Trimer-Containing Fc (kih) Fusion Antigen Binding Molecule, wherein the 4-1BB Ligands are C-Terminally Fused (Constructs 5.13 and 5.14) (CEA on the Hole Chain)

[0784] The molecules are prepared as described in Example 1.7 for the monovalent FAP-targeted construct, with the only difference that the anti-FAP binder was replaced by an anti-CEA binder.

[0785] The variable region of heavy and light chain DNA sequences encoding binder specific for carcinoembryonic antigen (CEA), clone T84.66-LCHA, are subcloned in frame with either the constant heavy chain of the knob or the constant light chain of human IgG1. The generation of the CEA clone is described in Example 1.5.

[0786] Combination of the huIgG1 Fc hole chain containing the Y349C/T366S/L368A/Y407V mutations in the CH3 domain, the anti-CEA huIgG1 knob chain containing the S354C/T366W mutations in the CH3 domain and the anti-CEA light chain allows generation of a heterodimer, which includes an assembled trimeric 4-1BB ligand and one CEA binding Fab (FIGS. 2C and 2D).

[0787] Table 31 shows the cDNA and amino acid sequences of the monovalent CEA(T84.66-LCHA)-targeted 4-1BB ligand (71-248) trimer-containing Fc (kih) fusion antigen binding molecule (Construct 5.13).

TABLE 17
Sequences of CEA(T84.66-LCHA)-targeted human 4-1BB ligand trimer
containing Fc (kih) fusion molecule Construct 5.13

| SEQ ID NO: | Description | Sequence |
|---|---|---|
| 191 | nucleotide | CAGGTGCAGCTGGTGCAGTCTGGCGCCGAAGTGAAGAA |
| | sequence of anti- | ACCCGGCAGCAGCGTGAAGGTGTCCTGCAAGGCCAGCG |
| | CEA(T84.66- | GCTTCAACATCAAGGACACCTACATGCACTGGGTGCGCC |
| | LCHA) Fc hole | AGGCCCCTGGACAGGGACTGGAATGGATGGGCAGAATC |
| | dimeric 4-1BB | GACCCCGCCAACGGCAACAGCAAATACGTGCCCAAGTT |
| | ligand (71-248) | CCAGGGCAGAGTGACCATCACCGCCGACACCAGCACCT |
| | chain | CCACCGCCTACATGGAACTGAGCAGCCTGCGGAGCGAG |
| | | GACACCGCCGTGTACTACTGTGCCCCCTTCGGCTACTAC |
| | | GTGTCCGACTACGCCATGGCCTATTGGGGCCAGGGCAC |
| | | ACTCGTGACCGTGTCCTCTGCTAGCACCAAGGGCCCCTC |
| | | CGTGTTCCCCCTGGCCCCCAGCAGCAAGAGCACCAGCG |
| | | GCGGCACAGCCGCTCTGGGCTGCCTGGTCAAGGACTACT |
| | | TCCCCGAGCCCGTGACCGTGTCCTGGAACAGCGGAGCC |
| | | CTGACCTCCGGCGTGCACACCTTCCCCGCCGTGCTGCAG |
| | | AGTTCTGGCCTGTATAGCCTGAGCAGCGTGGTCACCGTG |
| | | CCTTCTAGCAGCCTGGGCACCCAGACCTACATCTGCAAC |
| | | GTGAACCACAAGCCCAGCAACACCAAGGTGGACAAGAA |
| | | GGTGGAGCCCAAGAGCTGCGACAAAACTCACACATGCC |
| | | CACCGTGCCCAGCACCTGAAGCTGCAGGGGGACCGTCA |
| | | GTCTTCCTCTTCCCCCCAAAACCCAAGGACACCCTCATG |
| | | ATCTCCCGGACCCCTGAGGTCACATGCGTGGTGGTGGAC |
| | | GTGAGCCACGAAGACCCTGAGGTCAAGTTCAACTGGTA |
| | | CGTGGACGGCGTGGAGGTGCATAATGCCAAGACAAAGC |
| | | CGCGGGAGGAGCAGTACAACAGCACGTACCGTGTGGTC |
| | | AGCGTCCTCACCGTCCTGCACCAGGACTGGCTGAATGGC |
| | | AAGGAGTACAAGTGCAAGGTCTCCAACAAAGCCCTCGG |
| | | CGCCCCCATCGAGAAAACCATCTCCAAAGCCAAAGGGC |
| | | AGCCCCGAGAACCACAGGTGTGCACCCTGCCCCCATCCC |
| | | GGGATGAGCTGACCAAGAACCAGGTCAGCCTCTCGTGC |
| | | GCAGTCAAAGGCTTCTATCCCAGCGACATCGCCGTGGA |
| | | GTGGGAGAGCAATGGGCAGCCGGAGAACAACTACAAGA |
| | | CCACGCCTCCCGTGCTGGACTCCGACGGCTCCTTCTTCC |
| | | TCGTGAGCAAGCTCACCGTGGACAAGAGCAGGTGGCAG |
| | | CAGGGGAACGTCTTCTCATGCTCCGTGATGCATGAGGCT |
| | | CTGCACAACCACTACACGCAGAAGAGCCTCTCCCTGTCT |
| | | CCGGGTGGAGGCGGCGGAAGCGGAGGAGGAGGATCCA |
| | | GAGAGGGCCCTGAGCTGAGCCCTGATGATCCTGCCGGA |
| | | CTGCTGGACCTGCGGCAGGGAATGTTTGCCCAGCTGGTG |
| | | GCCCAGAACGTGCTGCTGATCGATGGCCCCCTGTCCTGG |
| | | TACAGCGATCCTGGACTGGCTGGCGTGTCACTGACAGGC |
| | | GGCCTGAGCTACAAAGAGGACACCAAAGAACTGGTGGT |
| | | GGCCAAGGCCGGCGTGTACTACGTGTTCTTTCAGCTGGA |
| | | ACTGCGGAGAGTGGTGGCCGGCGAAGGATCTGGCTCTG |
| | | TGTCTCTGGCCCTGCATCTGCAGCCTCTGAGATCTGCTG |
| | | CTGGCGCCGCTGCTCTGGCACTGACAGTGGATCTGCCTC |
| | | CTGCCAGCAGCGAGGCCCGGAATAGCGCATTTGGGTTTC |
| | | AAGGCAGGCTGCTGCACCTGTCTGCCGGCCAGAGGCTG |
| | | GGAGTGCATCTGCACACAGAGGCCAGGGCTAGACACGC |
| | | CTGGCAGCTGACACAGGGCGCTACAGTGCTGGGCCTGTT |
| | | CAGAGTGACCCCCGAGATTCCAGCAGGCCTGGGAGGCG |
| | | GCGGATCTGGCGGCGGAGGATCTAGAGAAGGACCCGAG |
| | | CTGTCCCCCGACGATCCCGCTGGGCTGCTGGATCTGAGA |
| | | CAGGGCATGTTCGCTCAGCTGGTGGCTCAGAATGTGCTG |
| | | CTGATTGACGGACCTCTGAGCTGGTACTCCGACCCAGGG |
| | | CTGGCAGGGGTGTCCCTGACTGGGGGACTGTCCTACAAA |
| | | GAAGATACAAAAGAACTGGTGGTGGCTAAAGCTGGGGT |
| | | GTACTATGTGTTTTTTCAGCTGGAACTGAGGCGGGTGGT |
| | | GGCTGGGGAGGGCTCAGGATCTGTGTCCCTGGCTCTGCA |
| | | TCTGCAGCCACTGCGCTCTGCAGCAGGGGCTGCAGCACT |
| | | GGCCCTGACTGTGGACCTGCCCCCAGCTTCTTCCGAGGC |
| | | CAGAAACAGCGCCTTCGGGTTCCAAGGACGCCTGCTGC |
| | | ATCTGAGCGCCGGACAGCGCCTGGGAGTGCATCTGCAT |
| | | ACTGAAGCCAGAGCCCGGCATGCTTGGCAGCTGACTCA |
| | | GGGGGCAACTGTGCTGGGACTGTTTCGCGTGACACCTGA |
| | | GATCCCAGCCGGGCTC |
| 172 | nucleotide | see Table 23 |
| | sequence of Fc | |
| | knob monomeric | |
| | 4-1BBL (71-248) | |
| 154 | nucleotide | see Table 17 |
| | sequence of anti- | |
| | CEA(T84.66- | |
| | LCHA) light | |
| | chain | |
| 192 | anti- | QVQLVQSGAEVKKPGSSVKVSCKASGFNIKDTYMHWVRQ |
| | CEA(T84.66- | APGQGLEWMGRIDPANGNSKYVPKFQGRVTITADTSTSTA |
| | LCHA) Fc hole | YMELSSLRSEDTAVYYCAPFGYYVSDYAMAYWGQGTLV |
| | dimeric 4-1BB | TVSSASTKGPSVFPLAPSSKSTSGGTAALGCLVKDYFPEPV |
| | (71-248) ligand | TVSWNSGALTSGVHTFPAVLQSSGLYSLSSVVTVPSSSLGT |
| | chain | QTYICNVNHKPSNTKVDKKVEPKSCDKTHTCPPCPAPEAA |
| | | GGPSVFLFPPKPKDTLMISRTPEVTCVVVDVSHEDPEVKFN |
| | | WYVDGVEVHNAKTKPREEQYNSTYRVVSVLTVLHQDWL |
| | | NGKEYKCKVSNKALGAPIEKTISKAKGQPREPQVCTLPPSR |
| | | DELTKNQVSLSCAVKGFYPSDIAVEWESNGQPENNYKTTP |
| | | PVLDSDGSFFLVSKLTVDKSRWQQGNVFSCSVMHEALHN |
| | | HYTQKSLSLSPGGGGGSGGGGSREGPELSPDDPAGLLDLR |
| | | QGMFAQLVAQNVLLIDGPLSWYSDPGLAGVSLTGGLSYKE |
| | | DTKELVVAKAGVYYVFFQLELRRVVAGEGSGSVSLALHL |
| | | QPLRSAAGAAALALTVDLPPASSEARNSAFGFQGRLLHLS |
| | | AGQRLGVHLHTEARARHAWQLTQGATVLGLFRVTPEIPA |
| | | GLGGGGSGGGGSREGPELSPDDPAGLLDLRQGMFAQLVA |
| | | QNVLLIDGPLSWYSDPGLAGVSLTGGLSYKEDTKELVVAK |
| | | AGVYYVFFQLELRRVVAGEGSGSVSLALHLQPLRSAAGAA |
| | | ALALTVDLPPASSEARNSAFGFQGRLLHLSAGQRLGVHLH |
| | | TEARARHAWQLTQGATVLGLFRVTPEIPAGL |
| 174 | Fc knob | see Table 23 |
| | monomeric 4-1- | |
| | BB (71-248) | |
| | ligand | |
| 156 | anti- | see Table 17 |
| | CEA(T84.66- | |
| | LCHA) light chain | |

[0788] Table 32 shows the cDNA and amino acid sequences of the monovalent CEA(T84.66-LCHA)-targeted 4-1BB ligand (71-248) trimer-containing Fc (kih) fusion antigen binding molecule (Construct 5.14).

TABLE 32
Sequences of CEA(T84.66-LCHA)-targeted human 4-1BB ligand trimer
containing Fc (kih) fusion molecule Construct 5.14

| SEQ ID NO: | Description | Sequence |
|---|---|---|
| 193 | nucleotide | CAGGTGCAGCTGGTGCAGTCTGGCGCCGAAGTGAAGAA |
| | sequence of anti- | ACCCGGCAGCAGCGTGAAGGTGTCCTGCAAGGCCAGCG |
| | CEA(T84.66- | GCTTCAACATCAAGGACACCTACATGCACTGGGTGCGCC |
| | LCHA) Fc hole | AGGCCCCTGGACAGGGACTGGAATGGATGGGCAGAATC |
| | monomeric 4- | GACCCCGCCAACGGCAACAGCAAATACGTGCCCAAGTT |
| | 1BBL (71-248) | CCAGGGCAGAGTGACCATCACCGCCGACACCAGCACCT |
| | chain | CCACCGCCTACATGGAACTGAGCAGCCTGCGGAGCGAG |
| | | GACACCGCCGTGTACTACTGTGCCCCCTTCGGCTACTAC |
| | | GTGTCCGACTACGCCATGGCCTATTGGGGCCAGGGCAC |
| | | ACTCGTGACCGTGTCCTCTGCTAGCACCAAGGGCCCCTC |
| | | CGTGTTCCCCCTGGCCCCCAGCAGCAAGAGCACCAGCG |
| | | GCGGCACAGCCGCTCTGGGCTGCCTGGTCAAGGACTACT |
| | | TCCCCGAGCCCGTGACCGTGTCCTGGAACAGCGGAGCC |
| | | CTGACCTCCGGCGTGCACACCTTCCCCGCCGTGCTGCAG |
| | | AGTTCTGGCCTGTATAGCCTGAGCAGCGTGGTCACCGTG |
| | | CCTTCTAGCAGCCTGGGCACCCAGACCTACATCTGCAAC |
| | | GTGAACCACAAGCCCAGCAACACCAAGGTGGACAAGAA |
| | | GGTGGAGCCCAAGAGCTGCGACAAAACTCACACATGCC |
| | | CACCGTGCCCAGCACCTGAAGCTGCAGGGGGACCGTCA |
| | | GTCTTCCTCTTCCCCCCAAAACCCAAGGACACCCTCATG |
| | | ATCTCCCGGACCCCTGAGGTCACATGCGTGGTGGTGGAC |
| | | GTGAGCCACGAAGACCCTGAGGTCAAGTTCAACTGGTA |
| | | CGTGGACGGCGTGGAGGTGCATAATGCCAAGACAAAGC |
| | | CGCGGGAGGAGCAGTACAACAGCACGTACCGTGTGGTC |
| | | AGCGTCCTCACCGTCCTGCACCAGGACTGGCTGAATGGC |
| | | AAGGAGTACAAGTGCAAGGTCTCCAACAAAGCCCTCGG |
| | | CGCCCCCATCGAGAAAACCATCTCCAAAGCCAAAGGGC |
| | | AGCCCCGAGAACCACAGGTGTGCACCCTGCCCCCATCCC |
| | | GGGATGAGCTGACCAAGAACCAGGTCAGCCTCTCGTGC |
| | | GCAGTCAAAGGCTTCTATCCCAGCGACATCGCCGTGGA |
| | | GTGGGAGAGCAATGGGCAGCCGGAGAACAACTACAAGA |
| | | CCACGCCTCCCGTGCTGGACTCCGACGGCTCCTTCTTCC |
| | | TCGTGAGCAAGCTCACCGTGGACAAGAGCAGGTGGCAG |
| | | CAGGGGAACGTCTTCTCATGCTCCGTGATGCATGAGGCT |
| | | CTGCACAACCACTACACGCAGAAGAGCCTCTCCCTGTCT |
| | | CCGGGTGGAGGCGGCGGAAGCGGAGGAGGAGGATCCA |
| | | GAGAGGGCCCTGAGCTGAGCCCTGATGATCCTGCCGGA |
| | | CTGCTGGACCTGCGGCAGGGAATGTTTGCCCAGCTGGTG |
| | | GCCCAGAACGTGCTGCTGATCGATGGCCCCCTGTCCTGG |
| | | TACAGCGATCCTGGACTGGCTGGCGTGTCACTGACAGGC |
| | | GGCCTGAGCTACAAAGAGGACACCAAAGAACTGGTGGT |
| | | GGCCAAGGCCGGCGTGTACTACGTGTTCTTTCAGCTGGA |
| | | ACTGCGGAGAGTGGTGGCCGGCGAAGGATCTGGCTCTG |
| | | TGTCTCTGGCCCTGCATCTGCAGCCTCTGAGATCTGCTG |
| | | CTGGCGCCGCTGCTCTGGCACTGACAGTGGATCTGCCTC |
| | | CTGCCAGCAGCGAGGCCCGGAATAGCGCATTTGGGTTTC |
| | | AAGGCAGGCTGCTGCACCTGTCTGCCGGCCAGAGGCTG |
| | | GGAGTGCATCTGCACACAGAGGCCAGGGCTAGACACGC |
| | | CTGGCAGCTGACACAGGGCGCTACAGTGCTGGGCCTGTT |
| | | CAGAGTGACCCCCGAGATTCCTGCCGGGCTC |
| 176 | nucleotide | see Table 24 |
| | sequence of Fc | |
| | knob dimeric 4- | |
| | 1BB (71-248) | |
| | ligand | |
| 154 | nucleotide | See Table 17 |
| | sequence of anti- | |
| | CEA(T84.66- | |
| | LCHA) light | |
| | chain | |
| 194 | anti- | QVQLVQSGAEVKKPGSSVKVSCKASGFNIKDTYMHWVRQ |
| | CEA(T84.66- | APGQGLEWMGRIDPANGNSKYVPKFQGRVTITADTSTSTA |
| | LCHA) Fc hole | YMELSSLRSEDTAVYYCAPFGYYVSDYAMAYWGQGTLV |
| | monomeric 4- | TVSSASTKGPSVFPLAPSSKSTSGGTAALGCLVKDYFPEPV |
| | 1BB ligand (71- | TVSWNSGALTSGVHTFPAVLQSSGLYSLSSVVTVPSSSLGT |
| | 248) chain | QTYICNVNHKPSNTKVDKKVEPKSCDKTHTCPPCPAPEAA |
| | | GGPSVFLFPPKPKDTLMISRTPEVTCVVVDVSHEDPEVKFN |
| | | WYVDGVEVHNAKTKPREEQYNSTYRVVSVLTVLHQDWL |
| | | NGKEYKCKVSNKALGAPIEKTISKAKGQPREPQVCTLPPSR |
| | | DELTKNQVSLSCAVKGFYPSDIAVEWESNGQPENNYKTTP |
| | | PVLDSDGSFFLVSKLTVDKSRWQQGNVFSCSVMHEALHN |
| | | HYTQKSLSLSPGGGGGSGGGGSREGPELSPDDPAGLLDLR |
| | | QGMFAQLVAQNVLLIDGPLSWYSDPGLAGVSLTGGLSYKE |
| | | DTKELVVAKAGVYYVFFQLELRRVVAGEGSGSVSLALHL |
| | | QPLRSAAGAAALALTVDLPPASSEARNSAFGFQGRLLHLS |
| | | AGQRLGVHLHTEARARHAWQLTQGATVLGLFRVTPEIPA |
| | | GL |
| 178 | Fc knob dimeric | see Table 24 |
| | 4-1BB (71-248) | |
| | ligand | |
| 156 | anti- | See Table 17 |
| | CEA(T84.66- | |
| | LCHA) light | |
| | chain | |

[0789] 1.10 Preparation of Monovalent Untargeted 4-1BB Ligand Trimer-Containing Fc (kih) Fusion Antigen Binding Molecules, wherein the 4-1BB Ligands are C-Terminally Fused (Controls J and K) (DP47 on the Hole Chain)

[0790] The molecule was prepared as described in Example 1.7 for the monovalent FAP targeted construct, with the only difference that the anti-FAP binder (VH-VL) was replaced by a germline control, termed DP47, not binding to the antigen.

[0791] Table 33 shows the cDNA and amino acid sequences of the monovalent untargeted 4-1BB ligand (71-248) trimer-containing Fc (kih) fusion antigen binding molecule (Control J).

TABLE 33
Sequences of monovalent DP47-untargeted human 4-1BB
ligand trimer containing Fc (kih) fusion molecule Control J

| SEQ ID | | |
|---|---|---|
| NO: | Description | Sequence |
| 195 | nucleotide | GAGGTGCAATTGTTGGAGTCTGGGGGAGGCTTGGTACA |
| | sequence of DP47 | GCCTGGGGGGTCCCTGAGACTCTCCTGTGCAGCCTCCGG |
| | Fc hole dimeric 4- | ATTCACCTTTAGCAGTTATGCCATGAGCTGGGTCCGCCA |
| | 1BB ligand (71- | GGCTCCAGGGAAGGGGCTGGAGTGGGTCTCAGCTATTA |
| | 248) chain | GTGGTAGTGGTGGTAGCACATACTACGCAGACTCCGTGA |
| | | AGGGCCGGTTCACCATCTCCAGAGACAATTCCAAGAAC |
| | | ACGCTGTATCTGCAGATGAACAGCCTGAGAGCCGAGGA |
| | | CACGGCCGTATATTACTGTGCGAAAGGCAGCGGATTTGA |
| | | CTACTGGGGCCAAGGAACCCTGGTCACCGTCTCGAGTGC |
| | | TAGCACCAAGGGCCCCTCCGTGTTCCCCCTGGCCCCCAG |
| | | CAGCAAGAGCACCAGCGGCGGCACAGCCGCTCTGGGCT |
| | | GCCTGGTCAAGGACTACTTCCCCGAGCCCGTGACCGTGT |
| | | CCTGGAACAGCGGAGCCCTGACCTCCGGCGTGCACACC |
| | | TTCCCCGCCGTGCTGCAGAGTTCTGGCCTGTATAGCCTG |
| | | AGCAGCGTGGTCACCGTGCCTTCTAGCAGCCTGGGCACC |
| | | CAGACCTACATCTGCAACGTGAACCACAAGCCCAGCAA |
| | | CACCAAGGTGGACAAGAAGGTGGAGCCCAAGAGCTGCG |
| | | ACAAAACTCACACATGCCCACCGTGCCCAGCACCTGAA |
| | | GCTGCAGGGGGACCGTCAGTCTTCCTCTTCCCCCCAAAA |
| | | CCCAAGGACACCCTCATGATCTCCCGGACCCCTGAGGTC |
| | | ACATGCGTGGTGGTGGACGTGAGCCACGAAGACCCTGA |
| | | GGTCAAGTTCAACTGGTACGTGGACGGCGTGGAGGTGC |
| | | ATAATGCCAAGACAAAGCCGCGGGAGGAGCAGTACAAC |
| | | AGCACGTACCGTGTGGTCAGCGTCCTCACCGTCCTGCAC |
| | | CAGGACTGGCTGAATGGCAAGGAGTACAAGTGCAAGGT |
| | | CTCCAACAAAGCCCTCGGCGCCCCCATCGAGAAAACCA |
| | | TCTCCAAAGCCAAAGGGCAGCCCCGAGAACCACAGGTG |
| | | TGCACCCTGCCCCCATCCCGGGATGAGCTGACCAAGAA |
| | | CCAGGTCAGCCTCTCGTGCGCAGTCAAAGGCTTCTATCC |
| | | CAGCGACATCGCCGTGGAGTGGGAGAGCAATGGGCAGC |
| | | CGGAGAACAACTACAAGACCACGCCTCCCGTGCTGGAC |
| | | TCCGACGGCTCCTTCTTCCTCGTGAGCAAGCTCACCGTG |
| | | GACAAGAGCAGGTGGCAGCAGGGGAACGTCTTCTCATG |
| | | CTCCGTGATGCATGAGGCTCTGCACAACCACTACACGCA |
| | | GAAGAGCCTCTCCCTGTCTCCGGGTGGAGGCGGCGGAA |
| | | GCGGAGGAGGAGGATCCAGAGAGGGCCCTGAGCTGAGC |
| | | CCTGATGATCCTGCCGGACTGCTGGACCTGCGGCAGGG |
| | | AATGTTTGCCCAGCTGGTGGCCCAGAACGTGCTGCTGAT |
| | | CGATGGCCCCCTGTCCTGGTACAGCGATCCTGGACTGGC |
| | | TGGCGTGTCACTGACAGGCGGCCTGAGCTACAAAGAGG |
| | | ACACCAAAGAACTGGTGGTGGCCAAGGCCGGCGTGTAC |
| | | TACGTGTTCTTTCAGCTGGAACTGCGGAGAGTGGTGGCC |
| | | GGCGAAGGATCTGGCTCTGTGTCTCTGGCCCTGCATCTG |
| | | CAGCCTCTGAGATCTGCTGCTGGCGCCGCTGCTCTGGCA |
| | | CTGACAGTGGATCTGCCTCCTGCCAGCAGCGAGGCCCG |
| | | GAATAGCGCATTTGGGTTTCAAGGCAGGCTGCTGCACCT |
| | | GTCTGCCGGCCAGAGGCTGGGAGTGCATCTGCACACAG |
| | | AGGCCAGGGCTAGACACGCCTGGCAGCTGACACAGGGC |
| | | GCTACAGTGCTGGGCCTGTTCAGAGTGACCCCCGAGATT |
| | | CCAGCAGGCCTGGGAGGCGGCGGATCTGGCGGCGGAGG |
| | | ATCTAGAGAAGGACCCGAGCTGTCCCCCGACGATCCCG |
| | | CTGGGCTGCTGGATCTGAGACAGGGCATGTTCGCTCAGC |
| | | TGGTGGCTCAGAATGTGCTGCTGATTGACGGACCTCTGA |
| | | GCTGGTACTCCGACCCAGGGCTGGCAGGGGTGTCCCTG |
| | | ACTGGGGGACTGTCCTACAAAGAAGATACAAAAGAACT |
| | | GGTGGTGGCTAAAGCTGGGGTGTACTATGTGTTTTTTCA |
| | | GCTGGAACTGAGGCGGGTGGTGGCTGGGGAGGGCTCAG |
| | | GATCTGTGTCCCTGGCTCTGCATCTGCAGCCACTGCGCT |
| | | CTGCAGCAGGGGCTGCAGCACTGGCCCTGACTGTGGAC |
| | | CTGCCCCCAGCTTCTTCCGAGGCCAGAAACAGCGCCTTC |
| | | GGGTTCCAAGGACGCCTGCTGCATCTGAGCGCCGGACA |
| | | GCGCCTGGGAGTGCATCTGCATACTGAAGCCAGAGCCC |
| | | GGCATGCTTGGCAGCTGACTCAGGGGGCAACTGTGCTG |
| | | GGACTGTTTCGCGTGACACCTGAGATCCCAGCCGGGCTC |
| 172 | nucleotide | see Table 23 |
| | sequence of Fc | |
| | knob monomeric | |
| | 4-1BBL (71-248) | |
| 166 | nucleotide | see Table 21 |
| | sequence of DP47 | |
| | light chain | |
| 196 | DP47 Fc hole | EVQLLESGGGLVQPGGSLRLSCAASGFTFSSYAMSWVRQA |
| | dimeric 4-1BB | PGKGLEWVSAISGSGGSTYYADSVKGRFTISRDNSKNTLYL |
| | ligand (71-248) | QMNSLRAEDTAVYYCAKGSGFDYWGQGTLVTVSSASTKG |
| | chain | PSVFPLAPSSKSTSGGTAALGCLVKDYFPEPVTVSWNSGAL |
| | | TSGVHTFPAVLQSSGLYSLSSVVTVPSSSLGTQTYICNVNH |
| | | KPSNTKVDKKVEPKSCDKTHTCPPCPAPEAAGGPSVFLFPP |
| | | KPKDTLMISRTPEVTCVVVDVSHEDPEVKFNWYVDGVEV |
| | | HNAKTKPREEQYNSTYRVVSVLTVLHQDWLNGKEYKCKV |
| | | SNKALGAPIEKTISKAKGQPREPQVCTLPPSRDELTKNQVS |
| | | LSCAVKGFYPSDIAVEWESNGQPENNYKTTPPVLDSDGSFF |
| | | LVSKLTVDKSRWQQGNVFSCSVMHEALHNHYTQKSLSLS |
| | | PGGGGGSGGGGSREGPELSPDDPAGLLDLRQGMFAQLVA |
| | | QNVLLIDGPLSWYSDPGLAGVSLTGGLSYKEDTKELVVAK |
| | | AGVYYVFFQLELRRVVAGEGSGSVSLALHLQPLRSAAGAA |
| | | ALALTVDLPPASSEARNSAFGFQGRLLHLSAGQRLGVHLH |
| | | TEARARHAWQLTQGATVLGLFRVTPEIPAGLGGGGSGGG |
| | | GSREGPELSPDDPAGLLDLRQGMFAQLVAQNVLLIDGPLS |
| | | WYSDPGLAGVSLTGGLSYKEDTKELVVAKAGVYYVFFQL |
| | | ELRRVVAGEGSGSVSLALHLQPLRSAAGAAALALTVDLPP |
| | | ASSEARNSAFGFQGRLLHLSAGQRLGVHLHTEARARHAW |
| | | QLTQGATVLGLFRVTPEIPAGL |
| 174 | Fc knob | see Table 23 |
| | monomeric 4-1- | |
| | BB (71-248) | |
| | ligand | |
| 168 | DP47 light chain | see Table 21 |

[0792] Table 34 shows the cDNA and amino acid sequences of the monovalent untargeted 4-1BB ligand (71-248) trimer-containing Fc (kih) fusion antigen binding molecule (Control K).

TABLE 34
Sequences of monovalent DP47-untargeted human 4-1BB
ligand trimer containing Fc (kih) fusion molecule Control K

| SEQ ID | | |
|---|---|---|
| NO: | Description | Sequence |
| 197 | nucleotide | GAGGTGCAATTGTTGGAGTCTGGGGGAGGCTTGGTACA |
| | sequence of DP47 | GCCTGGGGGGTCCCTGAGACTCTCCTGTGCAGCCTCCGG |
| | Fc hole | ATTCACCTTTAGCAGTTATGCCATGAGCTGGGTCCGCCA |
| | monomeric 4- | GGCTCCAGGGAAGGGGCTGGAGTGGGTCTCAGCTATTA |
| | 1BBL (71-248) | GTGGTAGTGGTGGTAGCACATACTACGCAGACTCCGTGA |
| | chain | AGGGCCGGTTCACCATCTCCAGAGACAATTCCAAGAAC |
| | | ACGCTGTATCTGCAGATGAACAGCCTGAGAGCCGAGGA |
| | | CACGGCCGTATATTACTGTGCGAAAGGCAGCGGATTTGA |
| | | CTACTGGGGCCAAGGAACCCTGGTCACCGTCTCGAGTGC |
| | | TAGCACCAAGGGCCCCTCCGTGTTCCCCCTGGCCCCCAG |
| | | CAGCAAGAGCACCAGCGGCGGCACAGCCGCTCTGGGCT |
| | | GCCTGGTCAAGGACTACTTCCCCGAGCCCGTGACCGTGT |
| | | CCTGGAACAGCGGAGCCCTGACCTCCGGCGTGCACACC |
| | | TTCCCCGCCGTGCTGCAGAGTTCTGGCCTGTATAGCCTG |
| | | AGCAGCGTGGTCACCGTGCCTTCTAGCAGCCTGGGCACC |
| | | CAGACCTACATCTGCAACGTGAACCACAAGCCCAGCAA |
| | | CACCAAGGTGGACAAGAAGGTGGAGCCCAAGAGCTGCG |
| | | ACAAAACTCACACATGCCCACCGTGCCCAGCACCTGAA |
| | | GCTGCAGGGGGACCGTCAGTCTTCCTCTTCCCCCCAAAA |
| | | CCCAAGGACACCCTCATGATCTCCCGGACCCCTGAGGTC |
| | | ACATGCGTGGTGGTGGACGTGAGCCACGAAGACCCTGA |
| | | GGTCAAGTTCAACTGGTACGTGGACGGCGTGGAGGTGC |
| | | ATAATGCCAAGACAAAGCCGCGGGAGGAGCAGTACAAC |
| | | AGCACGTACCGTGTGGTCAGCGTCCTCACCGTCCTGCAC |
| | | CAGGACTGGCTGAATGGCAAGGAGTACAAGTGCAAGGT |
| | | CTCCAACAAAGCCCTCGGCGCCCCCATCGAGAAAACCA |
| | | TCTCCAAAGCCAAAGGGCAGCCCCGAGAACCACAGGTG |
| | | TGCACCCTGCCCCCATCCCGGGATGAGCTGACCAAGAA |
| | | CCAGGTCAGCCTCTCGTGCGCAGTCAAAGGCTTCTATCC |
| | | CAGCGACATCGCCGTGGAGTGGGAGAGCAATGGGCAGC |
| | | CGGAGAACAACTACAAGACCACGCCTCCCGTGCTGGAC |
| | | TCCGACGGCTCCTTCTTCCTCGTGAGCAAGCTCACCGTG |
| | | GACAAGAGCAGGTGGCAGCAGGGGAACGTCTTCTCATG |
| | | CTCCGTGATGCATGAGGCTCTGCACAACCACTACACGCA |
| | | GAAGAGCCTCTCCCTGTCTCCGGGTGGAGGCGGCGGAA |
| | | GCGGAGGAGGAGGATCCAGAGAGGGCCCTGAGCTGAGC |
| | | CCTGATGATCCTGCCGGACTGCTGGACCTGCGGCAGGG |
| | | AATGTTTGCCCAGCTGGTGGCCCAGAACGTGCTGCTGAT |
| | | CGATGGCCCCCTGTCCTGGTACAGCGATCCTGGACTGGC |
| | | TGGCGTGTCACTGACAGGCGGCCTGAGCTACAAAGAGG |
| | | ACACCAAAGAACTGGTGGTGGCCAAGGCCGGCGTGTAC |
| | | TACGTGTTCTTTCAGCTGGAACTGCGGAGAGTGGTGGCC |
| | | GGCGAAGGATCTGGCTCTGTGTCTCTGGCCCTGCATCTG |
| | | CAGCCTCTGAGATCTGCTGCTGGCGCCGCTGCTCTGGCA |
| | | CTGACAGTGGATCTGCCTCCTGCCAGCAGCGAGGCCCG |
| | | GAATAGCGCATTTGGGTTTCAAGGCAGGCTGCTGCACCT |
| | | GTCTGCCGGCCAGAGGCTGGGAGTGCATCTGCACACAG |
| | | AGGCCAGGGCTAGACACGCCTGGCAGCTGACACAGGGC |
| | | GCTACAGTGCTGGGCCTGTTCAGAGTGACCCCCGAGATT |
| | | CCTGCCGGGCTC |
| 176 | nucleotide | see Table 24 |
| | sequence of Fc | |
| | knob dimeric 4- | |
| | 1BBL (71-248) | |
| 166 | nucleotide | See Table 21 |
| | sequence of DP47 | |
| | light chain | |
| 198 | DP47 Fc hole | EVQLLESGGGLVQPGGSLRLSCAASGFTFSSYAMSWVRQA |
| | monomeric 4- | PGKGLEWVSAISGSGGSTYYADSVKGRFTISRDNSKNTLYL |
| | 1BBL (71-248) | QMNSLRAEDTAVYYCAKGSGFDYWGQGTLVTVSSASTKG |
| | chain | PSVFPLAPSSKSTSGGTAALGCLVKDYFPEPVTVSWNSGAL |
| | | TSGVHTFPAVLQSSGLYSLSSVVTVPSSSLGTQTYICNVNH |
| | | KPSNTKVDKKVEPKSCDKTHTCPPCPAPEAAGGPSVFLFPP |
| | | KPKDTLMISRTPEVTCVVVDVSHEDPEVKFNWYVDGVEV |
| | | HNAKTKPREEQYNSTYRVVSVLTVLHQDWLNGKEYKCKV |
| | | SNKALGAPIEKTISKAKGQPREPQVCTLPPSRDELTKNQVS |
| | | LSCAVKGFYPSDIAVEWESNGQPENNYKTTPPVLDSDGSFF |
| | | LVSKLTVDKSRWQQGNVFSCSVMHEALHNHYTQKSLSLS |
| | | PGGGGGSGGGGSREGPELSPDDPAGLLDLRQGMFAQLVA |
| | | QNVLLIDGPLSWYSDPGLAGVSLTGGLSYKEDTKELVVAK |
| | | AGVYYVFFQLELRRVVAGEGSGSVSLALHLQPLRSAAGAA |
| | | ALALTVDLPPASSEARNSAFGFQGRLLHLSAGQRLGVHLH |
| | | TEARARHAWQLTQGATVLGLFRVTPEIPAGL |
| 178 | Fc knob dimeric | see Table 24 |
| | 4-1BBL (71-248) | |
| 168 | DP47 light chain | See Table 21 |

[0793] 1.11 Preparation of Additional Control Molecules

[0794] Control D, a molecule with N-terminal fused 4-1BBL moieties as depicted In FIG. 3B was prepared in combination with the germline control, termed DP47, not binding to the antigen.

[0795] The molecule comprises the Pro329Gly, Leu234Ala and Leu235Ala mutations in the constant region of the knob and hole heavy chains to abrogate binding to Fc gamma receptors according to the method described in International Patent Appl. Publ. No. WO 2012/130831 A1.

[0796] The polypeptide encoding the dimeric 4-1BB ligand fused to human CL domain was subcloned in frame with the human IgG1 heavy chain CH2 and CH3 domains on the knob and the polypeptide encoding the monomeric 4-1BB ligand was fused to human CH1 domain. To improve correct pairing the following mutations have been introduced in the crossed CH-CL. In the dimeric 4-1BB ligand fused to human CL, E123R and Q124K. In the monomeric 4-1BB ligand fused to human CH1, K147E and K213E.

[0797] Table 35 shows the cDNA and amino acid sequences of the monovalent “untargeted” 4-1BB ligand (71-248) trimer-containing Fc (kih) fusion antigen binding molecule (Control D).

TABLE 35
Sequences of monovalent DP47-untargeted human 4-1BB
ligand trimer containing Fc (kih) fusion molecule with CH-CL
cross and with charged residues* (Control D)

| SEQ ID | | |
|---|---|---|
| NO: | Description | Sequence |
| 199 | nucleotide | AGAGAGGGCCCTGAGCTGAGCCCCGATGATCCTGCTGG |
| | sequence of | ACTGCTGGACCTGCGGCAGGGCATGTTTGCTCAGCTGGT |
| | dimeric 4-1BB | GGCCCAGAACGTGCTGCTGATCGATGGCCCCCTGTCCTG |
| | ligand (71-248) - | GTACAGCGATCCTGGACTGGCTGGCGTGTCACTGACAGG |
| | CL* Fc knob | CGGCCTGAGCTACAAAGAGGACACCAAAGAACTGGTGG |
| | chain | TGGCCAAGGCCGGCGTGTACTACGTGTTCTTTCAGCTGG |
| | | AACTGCGGAGAGTGGTGGCCGGCGAAGGATCTGGCTCT |
| | | GTGTCTCTGGCCCTGCATCTGCAGCCTCTGAGATCTGCT |
| | | GCTGGCGCCGCTGCTCTGGCACTGACAGTGGATCTGCCT |
| | | CCTGCCAGCAGCGAGGCCCGGAATAGCGCATTTGGGTTT |
| | | CAAGGCAGGCTGCTGCACCTGTCTGCCGGCCAGAGGCT |
| | | GGGAGTGCATCTGCACACAGAGGCCAGGGCTAGACACG |
| | | CCTGGCAGCTGACACAGGGCGCTACAGTGCTGGGCCTG |
| | | TTCAGAGTGACCCCCGAGATTCCAGCCGGACTGGGAGG |
| | | CGGCGGATCTGGCGGCGGAGGATCTAGAGAAGGACCCG |
| | | AGCTGTCCCCTGACGATCCAGCCGGGCTGCTGGATCTGA |
| | | GACAGGGAATGTTCGCCCAGCTGGTGGCTCAGAATGTG |
| | | CTGCTGATTGACGGACCTCTGAGCTGGTACTCCGACCCA |
| | | GGGCTGGCAGGGGTGTCCCTGACTGGGGGACTGTCCTAC |
| | | AAAGAAGATACAAAAGAACTGGTGGTGGCTAAAGCTGG |
| | | GGTGTACTATGTGTTTTTTCAGCTGGAACTGAGGCGGGT |
| | | GGTGGCTGGGGAGGGCTCAGGATCTGTGTCCCTGGCTCT |
| | | GCATCTGCAGCCACTGCGCTCTGCAGCAGGGGCTGCAG |
| | | CACTGGCCCTGACTGTGGACCTGCCCCCAGCTTCTTCCG |
| | | AGGCCAGAAACAGCGCCTTCGGGTTCCAAGGACGCCTG |
| | | CTGCATCTGAGCGCCGGACAGCGCCTGGGAGTGCATCT |
| | | GCATACTGAAGCCAGAGCCCGGCATGCTTGGCAGCTGA |
| | | CTCAGGGGGCAACTGTGCTGGGACTGTTTCGCGTGACAC |
| | | CTGAGATCCCCGCTGGACTGGGCGGAGGCGGTTCCGGA |
| | | GGGGGAGGATCTCGTACGGTGGCTGCACCATCTGTCTTT |
| | | ATCTTCCCACCCAGCGACCGGAAGCTGAAGTCTGGCAC |
| | | AGCCAGCGTCGTGTGCCTGCTGAATAACTTCTACCCCCG |
| | | CGAGGCCAAGGTGCAGTGGAAGGTGGACAATGCCCTGC |
| | | AGAGCGGCAACAGCCAGGAAAGCGTGACCGAGCAGGA |
| | | CAGCAAGGACTCCACCTACAGCCTGAGCAGCACCCTGA |
| | | CCCTGAGCAAGGCCGACTACGAGAAGCACAAGGTGTAC |
| | | GCCTGCGAAGTGACCCACCAGGGCCTGTCTAGCCCCGTG |
| | | ACCAAGAGCTTCAACCGGGGCGAGTGCGACAAGACCCA |
| | | CACCTGTCCTCCATGCCCTGCCCCTGAAGCTGCTGGCGG |
| | | CCCTAGCGTGTTCCTGTTCCCCCCAAAGCCCAAGGACAC |
| | | CCTGATGATCAGCCGGACCCCTGAAGTGACCTGCGTGGT |
| | | GGTGGATGTGTCCCACGAGGACCCTGAAGTGAAGTTCA |
| | | ATTGGTACGTGGACGGCGTGGAAGTGCACAATGCCAAG |
| | | ACCAAGCCGCGGGAGGAGCAGTACAACAGCACGTACCG |
| | | TGTGGTCAGCGTCCTCACCGTCCTGCACCAGGACTGGCT |
| | | GAATGGCAAGGAGTACAAGTGCAAGGTCTCCAACAAAG |
| | | CCCTCGGCGCCCCCATCGAGAAAACCATCTCCAAAGCC |
| | | AAAGGGCAGCCCCGAGAACCACAGGTGTACACCCTGCC |
| | | CCCATGCCGGGATGAGCTGACCAAGAACCAGGTCAGCC |
| | | TGTGGTGCCTGGTCAAAGGCTTCTATCCCAGCGACATCG |
| | | CCGTGGAGTGGGAGAGCAATGGGCAGCCGGAGAACAAC |
| | | TACAAGACCACGCCTCCCGTGCTGGACTCCGACGGCTCC |
| | | TTCTTCCTCTACAGCAAGCTCACCGTGGACAAGAGCAGG |
| | | TGGCAGCAGGGGAACGTCTTCTCATGCTCCGTGATGCAT |
| | | GAGGCTCTGCACAACCACTACACGCAGAAGAGCCTCTC |
| | | CCTGTCTCCGGGTAAA |
| 200 | nucleotide | AGAGAGGGCCCTGAGCTGAGCCCCGATGATCCTGCTGG |
| | sequence of | ACTGCTGGACCTGCGGCAGGGCATGTTTGCTCAGCTGGT |
| | monomeric 4- | GGCCCAGAACGTGCTGCTGATCGATGGCCCCCTGTCCTG |
| | 1BBL (71-248) - | GTACAGCGATCCTGGACTGGCTGGCGTGTCACTGACAGG |
| | CH1* | CGGCCTGAGCTACAAAGAGGACACCAAAGAACTGGTGG |
| | | TGGCCAAGGCCGGCGTGTACTACGTGTTCTTTCAGCTGG |
| | | AACTGCGGAGAGTGGTGGCCGGCGAAGGATCTGGCTCT |
| | | GTGTCTCTGGCCCTGCATCTGCAGCCTCTGAGATCTGCT |
| | | GCTGGCGCCGCTGCTCTGGCACTGACAGTGGATCTGCCT |
| | | CCTGCCAGCAGCGAGGCCCGGAATAGCGCATTTGGGTTT |
| | | CAAGGCAGGCTGCTGCACCTGTCTGCCGGCCAGAGGCT |
| | | GGGAGTGCATCTGCACACAGAGGCCAGGGCTAGACACG |
| | | CCTGGCAGCTGACACAGGGCGCTACAGTGCTGGGCCTG |
| | | TTCAGAGTGACCCCCGAGATTCCAGCCGGACTGGGAGG |
| | | CGGAGGTTCCGGAGGCGGAGGATCTGCTAGCACAAAGG |
| | | GCCCCAGCGTGTTCCCTCTGGCCCCTAGCAGCAAGAGCA |
| | | CATCTGGCGGAACAGCCGCCCTGGGCTGCCTGGTGGAA |
| | | GATTACTTCCCCGAGCCCGTGACCGTGTCCTGGAATTCT |
| | | GGCGCCCTGACAAGCGGCGTGCACACCTTTCCAGCCGTG |
| | | CTGCAGAGCAGCGGCCTGTACTCTCTGAGCAGCGTCGTG |
| | | ACAGTGCCCAGCAGCTCTCTGGGCACCCAGACCTACATC |
| | | TGCAACGTGAACCACAAGCCCAGCAACACCAAGGTGGA |
| | | CGAGAAGGTGGAACCCAAGTCCTGC |
| 201 | nucleotide | GAGGTGCAATTGTTGGAGTCTGGGGGAGGCTTGGTACA |
| | sequence of DP47 | GCCTGGGGGGTCCCTGAGACTCTCCTGTGCAGCCTCCGG |
| | Fc hole chain | ATTCACCTTTAGCAGTTATGCCATGAGCTGGGTCCGCCA |
| | | GGCTCCAGGGAAGGGGCTGGAGTGGGTCTCAGCTATTA |
| | | GTGGTAGTGGTGGTAGCACATACTACGCAGACTCCGTGA |
| | | AGGGCCGGTTCACCATCTCCAGAGACAATTCCAAGAAC |
| | | ACGCTGTATCTGCAGATGAACAGCCTGAGAGCCGAGGA |
| | | CACGGCCGTATATTACTGTGCGAAAGGCAGCGGATTTGA |
| | | CTACTGGGGCCAAGGAACCCTGGTCACCGTCTCGAGTGC |
| | | TAGCACCAAGGGCCCATCGGTCTTCCCCCTGGCACCCTC |
| | | CTCCAAGAGCACCTCTGGGGGCACAGCGGCCCTGGGCT |
| | | GCCTGGTCAAGGACTACTTCCCCGAACCGGTGACGGTGT |
| | | CGTGGAACTCAGGCGCCCTGACCAGCGGCGTGCACACC |
| | | TTCCCGGCTGTCCTACAGTCCTCAGGACTCTACTCCCTC |
| | | AGCAGCGTGGTGACCGTGCCCTCCAGCAGCTTGGGCAC |
| | | CCAGACCTACATCTGCAACGTGAATCACAAGCCCAGCA |
| | | ACACCAAGGTGGACAAGAAAGTTGAGCCCAAATCTTGT |
| | | GACAAAACTCACACATGCCCACCGTGCCCAGCACCTGA |
| | | AGCTGCAGGGGGACCGTCAGTCTTCCTCTTCCCCCCAAA |
| | | ACCCAAGGACACCCTCATGATCTCCCGGACCCCTGAGGT |
| | | CACATGCGTGGTGGTGGACGTGAGCCACGAAGACCCTG |
| | | AGGTCAAGTTCAACTGGTACGTGGACGGCGTGGAGGTG |
| | | CATAATGCCAAGACAAAGCCGCGGGAGGAGCAGTACAA |
| | | CAGCACGTACCGTGTGGTCAGCGTCCTCACCGTCCTGCA |
| | | CCAGGACTGGCTGAATGGCAAGGAGTACAAGTGCAAGG |
| | | TCTCCAACAAAGCCCTCGGCGCCCCCATCGAGAAAACC |
| | | ATCTCCAAAGCCAAAGGGCAGCCCCGAGAACCACAGGT |
| | | GTGCACCCTGCCCCCATCCCGGGATGAGCTGACCAAGA |
| | | ACCAGGTCAGCCTCTCGTGCGCAGTCAAAGGCTTCTATC |
| | | CCAGCGACATCGCCGTGGAGTGGGAGAGCAATGGGCAG |
| | | CCGGAGAACAACTACAAGACCACGCCTCCCGTGCTGGA |
| | | CTCCGACGGCTCCTTCTTCCTCGTGAGCAAGCTCACCGT |
| | | GGACAAGAGCAGGTGGCAGCAGGGGAACGTCTTCTCAT |
| | | GCTCCGTGATGCATGAGGCTCTGCACAACCACTACACGC |
| | | AGAAGAGCCTCTCCCTGTCTCCGGGTAAA |
| 166 | nucleotide | see Table 21 |
| | sequence of DP47 | |
| | light chain | |
| 202 | dimeric 4-1BB | REGPELSPDDPAGLLDLRQGMFAQLVAQNVLLIDGPLSWY |
| | ligand (71-248) - | SDPGLAGVSLTGGLSYKEDTKELVVAKAGVYYVFFQLELR |
| | CL* Fc knob | RVVAGEGSGSVSLALHLQPLRSAAGAAALALTVDLPPASS |
| | chain | EARNSAFGFQGRLLHLSAGQRLGVHLHTEARARHAWQLT |
| | | QGATVLGLFRVTPEIPAGLGGGGSGGGGSREGPELSPDDPA |
| | | GLLDLRQGMFAQLVAQNVLLIDGPLSWYSDPGLAGVSLTG |
| | | GLSYKEDTKELVVAKAGVYYVFFQLELRRVVAGEGSGSV |
| | | SLALHLQPLRSAAGAAALALTVDLPPASSEARNSAFGFQG |
| | | RLLHLSAGQRLGVHLHTEARARHAWQLTQGATVLGLFRV |
| | | TPEIPAGLGGGGSGGGGSRTVAAPSVFIFPPSDRKLKSGTAS |
| | | VVCLLNNFYPREAKVQWKVDNALQSGNSQESVTEQDSKD |
| | | STYSLSSTLTLSKADYEKHKVYACEVTHQGLSSPVTKSFNR |
| | | GECDKTHTCPPCPAPEAAGGPSVFLFPPKPKDTLMISRTPE |
| | | VTCVVVDVSHEDPEVKFNWYVDGVEVHNAKTKPREEQY |
| | | NSTYRVVSVLTVLHQDWLNGKEYKCKVSNKALGAPIEKTI |
| | | SKAKGQPREPQVYTLPPCRDELTKNQVSLWCLVKGFYPSD |
| | | IAVEWESNGQPENNYKTTPPVLDSDGSFFLYSKLTVDKSR |
| | | WQQGNVFSCSVMHEALHNHYTQKSLSLSPGK |
| 203 | monomeric 4- | REGPELSPDDPAGLLDLRQGMFAQLVAQNVLLIDGPLSWY |
| | 1BBL (71-248) - | SDPGLAGVSLTGGLSYKEDTKELVVAKAGVYYVFFQLELR |
| | CH1* | RVVAGEGSGSVSLALHLQPLRSAAGAAALALTVDLPPASS |
| | | EARNSAFGFQGRLLHLSAGQRLGVHLHTEARARHAWQLT |
| | | QGATVLGLFRVTPEIPAGLGGGGSGGGGSASTKGPSVFPLA |
| | | PSSKSTSGGTAALGCLVEDYFPEPVTVSWNSGALTSGVHTF |
| | | PAVLQSSGLYSLSSVVTVPSSSLGTQTYICNVNHKPSNTKV |
| | | DEKVEPKSC |
| 204 | DP47 Fc hole | EVQLLESGGGLVQPGGSLRLSCAASGFTFSSYAMSWVRQA |
| | chain | PGKGLEWVSAISGSGGSTYYADSVKGRFTISRDNSKNTLYL |
| | | QMNSLRAEDTAVYYCAKGSGFDYWGQGTLVTVSSASTKG |
| | | PSVFPLAPSSKSTSGGTAALGCLVKDYFPEPVTVSWNSGAL |
| | | TSGVHTFPAVLQSSGLYSLSSVVTVPSSSLGTQTYICNVNH |
| | | KPSNTKVDKKVEPKSCDKTHTCPPCPAPEAAGGPSVFLFPP |
| | | KPKDTLMISRTPEVTCVVVDVSHEDPEVKFNWYVDGVEV |
| | | HNAKTKPREEQYNSTYRVVSVLTVLHQDWLNGKEYKCKV |
| | | SNKALGAPIEKTISKAKGQPREPQVCTLPPSRDELTKNQVS |
| | | LSCAVKGFYPSDIAVEWESNGQPENNYKTTPPVLDSDGSFF |
| | | LVSKLTVDKSRWQQGNVFSCSVMHEALHNHYTQKSLSLS |
| | | PGK |
| 168 | DP47 light chain | see Table 21 |

[0798] A FAP-targeted variant of Control D was prepared, wherein instead of DP47 the variable region of heavy and light chain DNA sequences encoding a binder specific for fibroblast activation protein (FAP), clone 4B9, were subcloned in frame with either the constant heavy chain of the hole or the constant light chain of human IgG1. Table 36 shows the cDNA and amino acid sequences of the monovalent FAP-targeted 4-1BB ligand (71-248) trimer-containing Fc (kih) fusion antigen binding molecule (Construct 2.4).

TABLE 36
Sequences of monovalent FAP(4B9)-targeted human 4-1BB ligand
(71-248) containing Fc (kih) fusion molecule Construct 2.4

| SEQ ID | | |
|---|---|---|
| NO: | Description | Sequence |
| 199 | nucleotide | see Table 35 |
| | sequence of | |
| | dimeric hu 4- | |
| | 1BBL (71-248) - | |
| | CL* Fc knob | |
| | chain | |
| 200 | nucleotide | see Table 35 |
| | sequence of | |
| | monomeric hu 4- | |
| | 1BBL (71-248) - | |
| | CH1* | |
| 235 | nucleotide | GAGGTGCAGCTGCTCGAAAGCGGCGGAGGACTGGTGCA |
| | sequence of anti- | GCCTGGCGGCAGCCTGAGACTGTCTTGCGCCGCCAGCG |
| | FAP (4B9) Fc | GCTTCACCTTCAGCAGCTACGCCATGAGCTGGGTCCGCC |
| | hole chain | AGGCCCCTGGCAAGGGACTGGAATGGGTGTCCGCCATC |
| | | ATCGGCTCTGGCGCCAGCACCTACTACGCCGACAGCGTG |
| | | AAGGGCCGGTTCACCATCAGCCGGGACAACAGCAAGAA |
| | | CACCCTGTACCTGCAGATGAACAGCCTGCGGGCCGAGG |
| | | ACACCGCCGTGTACTACTGCGCCAAGGGATGGTTCGGC |
| | | GGCTTCAACTACTGGGGACAGGGCACCCTGGTCACAGT |
| | | GTCCAGCGCTAGCACCAAGGGCCCCTCCGTGTTCCCCCT |
| | | GGCCCCCAGCAGCAAGAGCACCAGCGGCGGCACAGCCG |
| | | CTCTGGGCTGCCTGGTCAAGGACTACTTCCCCGAGCCCG |
| | | TGACCGTGTCCTGGAACAGCGGAGCCCTGACCTCCGGC |
| | | GTGCACACCTTCCCCGCCGTGCTGCAGAGTTCTGGCCTG |
| | | TATAGCCTGAGCAGCGTGGTCACCGTGCCTTCTAGCAGC |
| | | CTGGGCACCCAGACCTACATCTGCAACGTGAACCACAA |
| | | GCCCAGCAACACCAAGGTGGACAAGAAGGTGGAGCCCA |
| | | AGAGCTGCGACAAAACTCACACATGCCCACCGTGCCCA |
| | | GCACCTGAAGCTGCAGGGGGACCGTCAGTCTTCCTCTTC |
| | | CCCCCAAAACCCAAGGACACCCTCATGATCTCCCGGACC |
| | | CCTGAGGTCACATGCGTGGTGGTGGACGTGAGCCACGA |
| | | AGACCCTGAGGTCAAGTTCAACTGGTACGTGGACGGCG |
| | | TGGAGGTGCATAATGCCAAGACAAAGCCGCGGGAGGAG |
| | | CAGTACAACAGCACGTACCGTGTGGTCAGCGTCCTCACC |
| | | GTCCTGCACCAGGACTGGCTGAATGGCAAGGAGTACAA |
| | | GTGCAAGGTCTCCAACAAAGCCCTCGGCGCCCCCATCG |
| | | AGAAAACCATCTCCAAAGCCAAAGGGCAGCCCCGAGAA |
| | | CCACAGGTGTGCACCCTGCCCCCATCCCGGGATGAGCTG |
| | | ACCAAGAACCAGGTCAGCCTCTCGTGCGCAGTCAAAGG |
| | | CTTCTATCCCAGCGACATCGCCGTGGAGTGGGAGAGCA |
| | | ATGGGCAGCCGGAGAACAACTACAAGACCACGCCTCCC |
| | | GTGCTGGACTCCGACGGCTCCTTCTTCCTCGTGAGCAAG |
| | | CTCACCGTGGACAAGAGCAGGTGGCAGCAGGGGAACGT |
| | | CTTCTCATGCTCCGTGATGCATGAGGCTCTGCACAACCA |
| | | CTACACGCAGAAGAGCCTCTCCCTGTCTCCGGGTAAA |
| 103 | nucleotide | see Table 1 |
| | sequence of anti- | |
| | FAP(4B9) light | |
| | chain | |
| 202 | Dimeric hu 4- | see Table 35 |
| | 1BBL (71-248) - | |
| | CL* Fc knob | |
| | chain | |
| 203 | Monomeric hu 4- | see Table 35 |
| | 1BBL (71-248) - | |
| | CH1* | |
| 236 | anti-FAP (4B9) | EVQLLESGGGLVQPGGSLRLSCAASGFTFSSYAMSWVRQA |
| | Fc hole chain | PGKGLEWVSAIIGSGASTYYADSVKGRFTISRDNSKNTLYL |
| | | QMNSLRAEDTAVYYCAKGWFGGFNYWGQGTLVTVSSAS |
| | | TKGPSVFPLAPSSKSTSGGTAALGCLVKDYFPEPVTVSWNS |
| | | GALTSGVHTFPAVLQSSGLYSLSSVVTVPSSSLGTQTYICN |
| | | VNHKPSNTKVDKKVEPKSCDKTHTCPPCPAPEAAGGPSVF |
| | | LFPPKPKDTLMISRTPEVTCVVVDVSHEDPEVKFNWYVDG |
| | | VEVHNAKTKPREEQYNSTYRVVSVLTVLHQDWLNGKEYK |
| | | CKVSNKALGAPIEKTISKAKGQPREPQVCTLPPSRDELTKN |
| | | QVSLSCAVKGFYPSDIAVEWESNGQPENNYKTTPPVLDSD |
| | | GSFFLVSKLTVDKSRWQQGNVFSCSVMHEALHNHYTQKS |
| | | LSLSPGK |
| 106 | anti-FAP (4B9) | see Table 1 |
| | light chain | |

[0799] CD19-targeted variants were also prepared, wherein instead of DP47 the variable region of heavy and light chain DNA sequences encoding a binder specific for CD19, clones 8B8-018 and 8B8-2B11, were subcloned in frame with either the constant heavy chain of the hole or the constant light chain of human IgG1. The DNA sequence encoding part of the ectodomain (amino acids 71-254 or amino acids 71-248) of human 4-1BB ligand was synthetized according to the P41273 sequence of Uniprot database. Table 37a shows the cDNA and amino acid sequences of the monovalent CD19(8B8-018) targeted split trimeric 4-1BB ligand (71-248) Fc (kih) fusion antigen binding molecule with crossed CH-CL and charged residues (construct 3.4). Table 37b shows the cDNA and amino acid sequences of the monovalent CD19-targeted 4-1BB ligand (71-254) trimer-containing Fc (kih) fusion antigen binding molecule (Construct 4.1).

TABLE 37a
cDNA and amino acid sequences of monovalent CD19(8B8-018)
targeted split trimeric 4-1BB ligand (71-248) Fc (kih)
fusion containing CH-CL cross with charged residues
(construct 3.4).

| SEQ ID | | |
|---|---|---|
| NO: | Description | Sequence |
| 199 | nucleotide | see Table 35 |
| | sequence of | |
| | dimeric hu 4- | |
| | 1BBL (71-248) - | |
| | CL* Fc knob | |
| | chain | |
| 200 | nucleotide | see Table 35 |
| | sequence of | |
| | monomeric hu 4- | |
| | 1BBL (71-248) - | |
| | CH1* | |
| 237 | Nucleotide | CAGGTCCAGCTGGTGCAGTCCGGCGCCGAGGTCAAGAA |
| | sequence anti- | ACCCGGGGCTTCTGTGAAGGTTTCATGCAAGGCAAGCG |
| | CD19(8B8-018) | GATACACCTTCACCGACTATATCATGCATTGGGTCAGGC |
| | Fc hole chain | AGGCCCCTGGCCAAGGTCTCGAATGGATGGGCTACATTA |
| | | ACCCATATAATGATGGCTCCAAATACACCGAGAAGTTTC |
| | | AGGGAAGAGTCACTATGACATCTGACACCAGTATCAGC |
| | | ACTGCTTACATGGAGCTGTCCCGCCTTCGGTCTGATGAC |
| | | ACCGCAGTGTATTACTGTGCCAGGGGCACATATTACTAC |
| | | GGCTCAGCTCTGTTCGACTATTGGGGGCAGGGAACCACA |
| | | GTAACCGTGAGCTCCGCTAGCACCAAGGGCCCCTCCGTG |
| | | TTCCCCCTGGCCCCCAGCAGCAAGAGCACCAGCGGCGG |
| | | CACAGCCGCTCTGGGCTGCCTGGTCAAGGACTACTTCCC |
| | | CGAGCCCGTGACCGTGTCCTGGAACAGCGGAGCCCTGA |
| | | CCTCCGGCGTGCACACCTTCCCCGCCGTGCTGCAGAGTT |
| | | CTGGCCTGTATAGCCTGAGCAGCGTGGTCACCGTGCCTT |
| | | CTAGCAGCCTGGGCACCCAGACCTACATCTGCAACGTG |
| | | AACCACAAGCCCAGCAACACCAAGGTGGACAAGAAGGT |
| | | GGAGCCCAAGAGCTGCGACAAAACTCACACATGCCCAC |
| | | CGTGCCCAGCACCTGAAGCTGCAGGGGGACCGTCAGTC |
| | | TTCCTCTTCCCCCCAAAACCCAAGGACACCCTCATGATC |
| | | TCCCGGACCCCTGAGGTCACATGCGTGGTGGTGGACGTG |
| | | AGCCACGAAGACCCTGAGGTCAAGTTCAACTGGTACGT |
| | | GGACGGCGTGGAGGTGCATAATGCCAAGACAAAGCCGC |
| | | GGGAGGAGCAGTACAACAGCACGTACCGTGTGGTCAGC |
| | | GTCCTCACCGTCCTGCACCAGGACTGGCTGAATGGCAAG |
| | | GAGTACAAGTGCAAGGTCTCCAACAAAGCCCTCGGCGC |
| | | CCCCATCGAGAAAACCATCTCCAAAGCCAAAGGGCAGC |
| | | CCCGAGAACCACAGGTGTGCACCCTGCCCCCATCCCGG |
| | | GATGAGCTGACCAAGAACCAGGTCAGCCTCTCGTGCGC |
| | | AGTCAAAGGCTTCTATCCCAGCGACATCGCCGTGGAGTG |
| | | GGAGAGCAATGGGCAGCCGGAGAACAACTACAAGACC |
| | | ACGCCTCCCGTGCTGGACTCCGACGGCTCCTTCTTCCTC |
| | | GTGAGCAAGCTCACCGTGGACAAGAGCAGGTGGCAGCA |
| | | GGGGAACGTCTTCTCATGCTCCGTGATGCATGAGGCTCT |
| | | GCACAACCACTACACGCAGAAGAGCCTCTCCCTGTCTCC |
| | | GGGTAAA |
| 118 | Nucleotide | see Table 5 |
| | sequence anti- | |
| | CD19(8B8-018) | |
| | light chain | |
| 202 | Dimeric hu 4- | see Table 35 |
| | 1BBL (71-248) - | |
| | CL* Fc knob | |
| | chain | |
| 203 | Monomeric hu 4- | see Table 35 |
| | 1BBL (71-248) - | |
| | CH1* | |
| 238 | anti-CD19(8B8- | QVQLVQSGAEVKKPGASVKVSCKASGYTFTDYIMHWVRQ |
| | 018) Fc hole | APGQGLEWMGYINPYNDGSKYTEKFQGRVTMTSDTSISTA |
| | chain | YMELSRLRSDDTAVYYCARGTYYYGSALFDYWGQGTTVT |
| | | VSSASTKGPSVFPLAPSSKSTSGGTAALGCLVKDYFPEPVT |
| | | VSWNSGALTSGVHTFPAVLQSSGLYSLSSVVTVPSSSLGTQ |
| | | TYICNVNHKPSNTKVDKKVEPKSCDKTHTCPPCPAPEAAG |
| | | GPSVFLFPPKPKDTLMISRTPEVTCVVVDVSHEDPEVKFNW |
| | | YVDGVEVHNAKTKPREEQYNSTYRVVSVLTVLHQDWLN |
| | | GKEYKCKVSNKALGAPIEKTISKAKGQPREPQVCTLPPSRD |
| | | ELTKNQVSLSCAVKGFYPSDIAVEWESNGQPENNYKTTPP |
| | | VLDSDGSFFLVSKLTVDKSRWQQGNVFSCSVMHEALHNH |
| | | YTQKSLSLSPGK |
| 120 | anti-CD19(8B8- | see Table 5 |
| | 018) light chain | |

*charged residues

TABLE 37b
Sequences of monovalent CD19(8B8-2B11)-targeted human
4-1BB ligand (71- 254) containing Fc (kih) fusion
molecule Construct 4.1

| SEQ ID | | |
|---|---|---|
| NO: | Description | Sequence |
| 239 | nucleotide | AGAGAGGGCCCTGAGCTGAGCCCCGATGATCCTGCTGG |
| | sequence of | ACTGCTGGACCTGCGGCAGGGCATGTTTGCTCAGCTGGT |
| | dimeric hu 4- | GGCCCAGAACGTGCTGCTGATCGATGGCCCCCTGTCCTG |
| | 1BBL (71-254) - | GTACAGCGATCCTGGACTGGCTGGCGTGTCACTGACAGG |
| | CL* Fc knob | CGGCCTGAGCTACAAAGAGGACACCAAAGAACTGGTGG |
| | chain | TGGCCAAGGCCGGCGTGTACTACGTGTTCTTTCAGCTGG |
| | | AACTGCGGAGAGTGGTGGCCGGCGAAGGATCTGGCTCT |
| | | GTGTCTCTGGCCCTGCATCTGCAGCCTCTGAGAAGCGCT |
| | | GCTGGCGCTGCAGCTCTGGCACTGACAGTGGATCTGCCT |
| | | CCTGCCAGCTCCGAGGCCCGGAATAGCGCATTTGGGTTT |
| | | CAAGGCAGGCTGCTGCACCTGTCTGCCGGCCAGAGGCT |
| | | GGGAGTGCATCTGCACACAGAGGCCAGGGCTAGACACG |
| | | CCTGGCAGCTGACACAGGGCGCTACAGTGCTGGGCCTG |
| | | TTCAGAGTGACCCCCGAGATTCCAGCCGGCCTGCCTTCT |
| | | CCAAGAAGCGAAGGCGGAGGCGGATCTGGCGGCGGAG |
| | | GATCTAGAGAGGGACCCGAACTGTCCCCTGACGATCCA |
| | | GCCGGGCTGCTGGATCTGAGACAGGGAATGTTCGCCCA |
| | | GCTGGTGGCTCAGAATGTGCTGCTGATTGACGGACCTCT |
| | | GAGCTGGTACTCCGACCCAGGGCTGGCAGGGGTGTCCC |
| | | TGACTGGGGGACTGTCCTACAAAGAAGATACAAAAGAA |
| | | CTGGTGGTGGCTAAAGCTGGGGTGTACTATGTGTTTTTT |
| | | CAGCTGGAACTGAGGCGGGTGGTGGCTGGGGAGGGCTC |
| | | AGGATCTGTGTCCCTGGCTCTGCATCTGCAGCCACTGCG |
| | | CTCTGCTGCTGGCGCAGCTGCACTGGCTCTGACTGTGGA |
| | | CCTGCCACCAGCCTCTAGCGAGGCCAGAAACAGCGCCT |
| | | TCGGGTTCCAAGGACGCCTGCTGCATCTGAGCGCCGGAC |
| | | AGCGCCTGGGAGTGCATCTGCATACTGAAGCCAGAGCC |
| | | CGGCATGCTTGGCAGCTGACTCAGGGGGCAACTGTGCTG |
| | | GGACTGTTTCGCGTGACACCTGAGATCCCTGCCGGACTG |
| | | CCAAGCCCTAGATCAGAAGGGGGCGGAGGTTCCGGAGG |
| | | GGGAGGATCTCGTACGGTGGCTGCACCATCTGTCTTTAT |
| | | CTTCCCACCCAGCGACCGGAAGCTGAAGTCTGGCACAG |
| | | CCAGCGTCGTGTGCCTGCTGAATAACTTCTACCCCCGCG |
| | | AGGCCAAGGTGCAGTGGAAGGTGGACAATGCCCTGCAG |
| | | AGCGGCAACAGCCAGGAAAGCGTGACCGAGCAGGACA |
| | | GCAAGGACTCCACCTACAGCCTGAGCAGCACCCTGACC |
| | | CTGAGCAAGGCCGACTACGAGAAGCACAAGGTGTACGC |
| | | CTGCGAAGTGACCCACCAGGGCCTGTCTAGCCCCGTGAC |
| | | CAAGAGCTTCAACCGGGGCGAGTGCGACAAGACCCACA |
| | | CCTGTCCTCCATGCCCTGCCCCTGAAGCTGCTGGCGGCC |
| | | CTAGCGTGTTCCTGTTCCCCCCAAAGCCCAAGGACACCC |
| | | TGATGATCAGCCGGACCCCTGAAGTGACCTGCGTGGTGG |
| | | TGGATGTGTCCCACGAGGACCCTGAAGTGAAGTTCAATT |
| | | GGTACGTGGACGGCGTGGAAGTGCACAATGCCAAGACC |
| | | AAGCCGCGGGAGGAGCAGTACAACAGCACGTACCGTGT |
| | | GGTCAGCGTCCTCACCGTCCTGCACCAGGACTGGCTGAA |
| | | TGGCAAGGAGTACAAGTGCAAGGTCTCCAACAAAGCCC |
| | | TCGGCGCCCCCATCGAGAAAACCATCTCCAAAGCCAAA |
| | | GGGCAGCCCCGAGAACCACAGGTGTACACCCTGCCCCC |
| | | ATGCCGGGATGAGCTGACCAAGAACCAGGTCAGCCTGT |
| | | GGTGCCTGGTCAAAGGCTTCTATCCCAGCGACATCGCCG |
| | | TGGAGTGGGAGAGCAATGGGCAGCCGGAGAACAACTAC |
| | | AAGACCACGCCTCCCGTGCTGGACTCCGACGGCTCCTTC |
| | | TTCCTCTACAGCAAGCTCACCGTGGACAAGAGCAGGTG |
| | | GCAGCAGGGGAACGTCTTCTCATGCTCCGTGATGCATGA |
| | | GGCTCTGCACAACCACTACACGCAGAAGAGCCTCTCCCT |
| | | GTCTCCGGGTAAA |
| 240 | nucleotide | AGAGAGGGCCCTGAGCTGAGCCCCGATGATCCTGCTGG |
| | sequence of | ACTGCTGGACCTGCGGCAGGGCATGTTTGCTCAGCTGGT |
| | monomeric hu 4- | GGCCCAGAACGTGCTGCTGATCGATGGCCCCCTGTCCTG |
| | 1BBL (71-254) - | GTACAGCGATCCTGGACTGGCTGGCGTGTCACTGACAGG |
| | CH1* | CGGCCTGAGCTACAAAGAGGACACCAAAGAACTGGTGG |
| | | TGGCCAAGGCCGGCGTGTACTACGTGTTCTTTCAGCTGG |
| | | AACTGCGGAGAGTGGTGGCCGGCGAAGGATCTGGCTCT |
| | | GTGTCTCTGGCCCTGCATCTGCAGCCTCTGAGAAGCGCT |
| | | GCTGGCGCTGCAGCTCTGGCTCTGACAGTGGATCTGCCT |
| | | CCTGCCAGCTCCGAGGCCCGGAATAGCGCATTTGGGTTT |
| | | CAAGGCCGGCTGCTGCACCTGTCTGCCGGCCAGAGACT |
| | | GGGAGTGCATCTGCACACAGAGGCCAGAGCCAGGCACG |
| | | CCTGGCAGCTGACACAGGGCGCTACAGTGCTGGGCCTG |
| | | TTCAGAGTGACCCCCGAGATTCCTGCCGGCCTGCCTAGC |
| | | CCTAGATCTGAAGGCGGCGGAGGTTCCGGAGGCGGAGG |
| | | ATCTGCTAGCACAAAGGGCCCCAGCGTGTTCCCTCTGGC |
| | | CCCTAGCAGCAAGAGCACATCTGGCGGAACAGCCGCCC |
| | | TGGGCTGCCTGGTGGAAGATTACTTCCCCGAGCCCGTGA |
| | | CCGTGTCCTGGAATTCTGGCGCCCTGACAAGCGGCGTGC |
| | | ACACCTTTCCAGCCGTGCTGCAGAGCAGCGGCCTGTACT |
| | | CTCTGAGCAGCGTCGTGACAGTGCCCAGCAGCTCTCTGG |
| | | GCACCCAGACCTACATCTGCAACGTGAACCACAAGCCC |
| | | AGCAACACCAAGGTGGACGAGAAGGTGGAACCCAAGTC |
| | | CTGC |
| 241 | nucleotide | CAGGTGCAATTGGTTCAATCTGGTGCTGAAGTAAAAAA |
| | sequence of anti- | ACCGGGCGCTTCCGTTAAAGTGAGCTGCAAAGCATCTGG |
| | CD19(8B8-2B11) | TTACACCTTCACTGACTATATCATGCACTGGGTTCGTCA |
| | Fc hole chain | GGCCCCGGGCCAGGGTCTGGAGTGGATGGGCTACATTA |
| | | ACCCATACAACGACGGTTCCAAATATACCGAGAAATTC |
| | | CAGGGCCGCGTCACGATGACCAGCGACACTTCTATCTCC |
| | | ACCGCGTACATGGAACTGTCTAGACTGCGTTCTGACGAC |
| | | ACCGCTGTTTACTATTGTGCACGCGGTACCTACTACTAC |
| | | GGTCCACAGCTGTTTGATTACTGGGGCCAAGGTACCACG |
| | | GTGACCGTAAGCTCTGCTAGCACCAAGGGCCCCTCCGTG |
| | | TTCCCCCTGGCCCCCAGCAGCAAGAGCACCAGCGGCGG |
| | | CACAGCCGCTCTGGGCTGCCTGGTCAAGGACTACTTCCC |
| | | CGAGCCCGTGACCGTGTCCTGGAACAGCGGAGCCCTGA |
| | | CCTCCGGCGTGCACACCTTCCCCGCCGTGCTGCAGAGTT |
| | | CTGGCCTGTATAGCCTGAGCAGCGTGGTCACCGTGCCTT |
| | | CTAGCAGCCTGGGCACCCAGACCTACATCTGCAACGTG |
| | | AACCACAAGCCCAGCAACACCAAGGTGGACAAGAAGGT |
| | | GGAGCCCAAGAGCTGCGACAAAACTCACACATGCCCAC |
| | | CGTGCCCAGCACCTGAAGCTGCAGGGGGACCGTCAGTC |
| | | TTCCTCTTCCCCCCAAAACCCAAGGACACCCTCATGATC |
| | | TCCCGGACCCCTGAGGTCACATGCGTGGTGGTGGACGTG |
| | | AGCCACGAAGACCCTGAGGTCAAGTTCAACTGGTACGT |
| | | GGACGGCGTGGAGGTGCATAATGCCAAGACAAAGCCGC |
| | | GGGAGGAGCAGTACAACAGCACGTACCGTGTGGTCAGC |
| | | GTCCTCACCGTCCTGCACCAGGACTGGCTGAATGGCAAG |
| | | GAGTACAAGTGCAAGGTCTCCAACAAAGCCCTCGGCGC |
| | | CCCCATCGAGAAAACCATCTCCAAAGCCAAAGGGCAGC |
| | | CCCGAGAACCACAGGTGTGCACCCTGCCCCCATCCCGG |
| | | GATGAGCTGACCAAGAACCAGGTCAGCCTCTCGTGCGC |
| | | AGTCAAAGGCTTCTATCCCAGCGACATCGCCGTGGAGTG |
| | | GGAGAGCAATGGGCAGCCGGAGAACAACTACAAGACC |
| | | ACGCCTCCCGTGCTGGACTCCGACGGCTCCTTCTTCCTC |
| | | GTGAGCAAGCTCACCGTGGACAAGAGCAGGTGGCAGCA |
| | | GGGGAACGTCTTCTCATGCTCCGTGATGCATGAGGCTCT |
| | | GCACAACCACTACACGCAGAAGAGCCTCTCCCTGTCTCC |
| | | GGGTAAA |
| 124 | nucleotide | see Table 7 |
| | sequence of anti- | |
| | CD19(8B8-2B11) | |
| | light chain | |
| 242 | Dimeric hu 4- | REGPELSPDDPAGLLDLRQGMFAQLVAQNVLLIDGPLSWY |
| | 1BBL (71-254) - | SDPGLAGVSLTGGLSYKEDTKELVVAKAGVYYVFFQLELR |
| | CL* Fc knob | RVVAGEGSGSVSLALHLQPLRSAAGAAALALTVDLPPASS |
| | chain | EARNSAFGFQGRLLHLSAGQRLGVHLHTEARARHAWQLT |
| | | QGATVLGLFRVTPEIPAGLPSPRSEGGGGSGGGGSREGPEL |
| | | SPDDPAGLLDLRQGMFAQLVAQNVLLIDGPLSWYSDPGLA |
| | | GVSLTGGLSYKEDTKELVVAKAGVYYVFFQLELRRVVAG |
| | | EGSGSVSLALHLQPLRSAAGAAALALTVDLPPASSEARNS |
| | | AFGFQGRLLHLSAGQRLGVHLHTEARARHAWQLTQGATV |
| | | LGLFRVTPEIPAGLPSPRSEGGGGSGGGGSRTVAAPSVFIFP |
| | | PSDRKLKSGTASVVCLLNNFYPREAKVQWKVDNALQSGN |
| | | SQESVTEQDSKDSTYSLSSTLTLSKADYEKHKVYACEVTH |
| | | QGLSSPVTKSFNRGECDKTHTCPPCPAPEAAGGPSVFLFPP |
| | | KPKDTLMISRTPEVTCVVVDVSHEDPEVKFNWYVDGVEV |
| | | HNAKTKPREEQYNSTYRVVSVLTVLHQDWLNGKEYKCKV |
| | | SNKALGAPIEKTISKAKGQPREPQVYTLPPCRDELTKNQVS |
| | | LWCLVKGFYPSDIAVEWESNGQPENNYKTTPPVLDSDGSF |
| | | FLYSKLTVDKSRWQQGNVFSCSVMHEALHNHYTQKSLSL |
| | | SPGK |
| 243 | Monomeric hu 4- | REGPELSPDDPAGLLDLRQGMFAQLVAQNVLLIDGPLSWY |
| | 1BBL (71-254) - | SDPGLAGVSLTGGLSYKEDTKELVVAKAGVYYVFFQLELR |
| | CH1* | RVVAGEGSGSVSLALHLQPLRSAAGAAALALTVDLPPASS |
| | | EARNSAFGFQGRLLHLSAGQRLGVHLHTEARARHAWQLT |
| | | QGATVLGLFRVTPEIPAGLPSPRSEGGGGSGGGGSASTKGP |
| | | SVFPLAPSSKSTSGGTAALGCLVEDYFPEPVTVSWNSGALT |
| | | SGVHTFPAVLQSSGLYSLSSVVTVPSSSLGTQTYICNVNHK |
| | | PSNTKVDEKVEPKSC |
| 244 | CD19(8B8-2B11) | QVQLVQSGAEVKKPGASVKVSCKASGYTFTDYIMHWVRQ |
| | Fc hole chain | APGQGLEWMGYINPYNDGSKYTEKFQGRVTMTSDTSISTA |
| | | YMELSRLRSDDTAVYYCARGTYYYGPQLFDYWGQGTTVT |
| | | VSSASTKGPSVFPLAPSSKSTSGGTAALGCLVKDYFPEPVT |
| | | VSWNSGALTSGVHTFPAVLQSSGLYSLSSVVTVPSSSLGTQ |
| | | TYICNVNHKPSNTKVDKKVEPKSCDKTHTCPPCPAPEAAG |
| | | GPSVFLFPPKPKDTLMISRTPEVTCVVVDVSHEDPEVKFNW |
| | | YVDGVEVHNAKTKPREEQYNSTYRVVSVLTVLHQDWLN |
| | | GKEYKCKVSNKALGAPIEKTISKAKGQPREPQVCTLPPSRD |
| | | ELTKNQVSLSCAVKGFYPSDIAVEWESNGQPENNYKTTPP |
| | | VLDSDGSFFLVSKLTVDKSRWQQGNVFSCSVMHEALHNH |
| | | YTQKSLSLSPGK |
| 126 | anti-CD19(8B8- | see Table 7 |
| | 2B11) light chain | |

[0800] An additional control used in the assays, termed control F, was an untargeted DP47, germline control, human IgG1, containing the Pro329Gly, Leu234Ala and Leu235Ala mutations (termed PGLALA) to abrogate binding to Fc gamma receptors according to the method described in International Patent Appl. Publ. No. WO 2012/130831 A1.

[0801] Table 38 shows the cDNA and amino acid sequences of the “untargeted” DP47 hu IgG1 PGLALA antibody (Control F).

TABLE 38
Sequences of DP47-untargeted human IgG1 PGLALA (Control F)

| SEQ ID | | |
|---|---|---|
| NO: | Description | Sequence |
| 205 | nucleotide | GAGGTGCAATTGTTGGAGTCTGGGGGAGGCTTGGTACA |
| | sequence of DP47 | GCCTGGGGGGTCCCTGAGACTCTCCTGTGCAGCCTCCGG |
| | heavy chain | ATTCACCTTTAGCAGTTATGCCATGAGCTGGGTCCGCCA |
| | (huIgG1 | GGCTCCAGGGAAGGGGCTGGAGTGGGTCTCAGCTATTA |
| | PGLALA) | GTGGTAGTGGTGGTAGCACATACTACGCAGACTCCGTGA |
| | | AGGGCCGGTTCACCATCTCCAGAGACAATTCCAAGAAC |
| | | ACGCTGTATCTGCAGATGAACAGCCTGAGAGCCGAGGA |
| | | CACGGCCGTATATTACTGTGCGAAAGGCAGCGGATTTGA |
| | | CTACTGGGGCCAAGGAACCCTGGTCACCGTCTCGAGTGC |
| | | TAGCACCAAGGGCCCATCGGTCTTCCCCCTGGCACCCTC |
| | | CTCCAAGAGCACCTCTGGGGGCACAGCGGCCCTGGGCT |
| | | GCCTGGTCAAGGACTACTTCCCCGAACCGGTGACGGTGT |
| | | CGTGGAACTCAGGCGCCCTGACCAGCGGCGTGCACACC |
| | | TTCCCGGCTGTCCTACAGTCCTCAGGACTCTACTCCCTC |
| | | AGCAGCGTGGTGACCGTGCCCTCCAGCAGCTTGGGCAC |
| | | CCAGACCTACATCTGCAACGTGAATCACAAGCCCAGCA |
| | | ACACCAAGGTGGACAAGAAAGTTGAGCCCAAATCTTGT |
| | | GACAAAACTCACACATGCCCACCGTGCCCAGCACCTGA |
| | | AGCTGCAGGGGGACCGTCAGTCTTCCTCTTCCCCCCAAA |
| | | ACCCAAGGACACCCTCATGATCTCCCGGACCCCTGAGGT |
| | | CACATGCGTGGTGGTGGACGTGAGCCACGAAGACCCTG |
| | | AGGTCAAGTTCAACTGGTACGTGGACGGCGTGGAGGTG |
| | | CATAATGCCAAGACAAAGCCGCGGGAGGAGCAGTACAA |
| | | CAGCACGTACCGTGTGGTCAGCGTCCTCACCGTCCTGCA |
| | | CCAGGACTGGCTGAATGGCAAGGAGTACAAGTGCAAGG |
| | | TCTCCAACAAAGCCCTCGGCGCCCCCATCGAGAAAACC |
| | | ATCTCCAAAGCCAAAGGGCAGCCCCGAGAACCACAGGT |
| | | GTACACCCTGCCCCCATCCCGGGATGAGCTGACCAAGA |
| | | ACCAGGTCAGCCTGACCTGCCTGGTCAAAGGCTTCTATC |
| | | CCAGCGACATCGCCGTGGAGTGGGAGAGCAATGGGCAG |
| | | CCGGAGAACAACTACAAGACCACGCCTCCCGTGCTGGA |
| | | CTCCGACGGCTCCTTCTTCCTCTACAGCAAGCTCACCGT |
| | | GGACAAGAGCAGGTGGCAGCAGGGGAACGTCTTCTCAT |
| | | GCTCCGTGATGCATGAGGCTCTGCACAACCACTACACGC |
| | | AGAAGAGCCTCTCCCTGTCTCCGGGTAAA |
| 166 | nucleotide | see Table 21 |
| | sequence of DP47 | |
| | light chain | |
| 206 | DP47 heavy chain | EVQLLESGGGLVQPGGSLRLSCAASGFTFSSYAMSWVRQA |
| | (huIgG1 | PGKGLEWVSAISGSGGSTYYADSVKGRFTISRDNSKNTLYL |
| | PGLALA) | QMNSLRAEDTAVYYCAKGSGFDYWGQGTLVTVSSASTKG |
| | | PSVFPLAPSSKSTSGGTAALGCLVKDYFPEPVTVSWNSGAL |
| | | TSGVHTFPAVLQSSGLYSLSSVVTVPSSSLGTQTYICNVNH |
| | | KPSNTKVDKKVEPKSCDKTHTCPPCPAPEAAGGPSVFLFPP |
| | | KPKDTLMISRTPEVTCVVVDVSHEDPEVKFNWYVDGVEV |
| | | HNAKTKPREEQYNSTYRVVSVLTVLHQDWLNGKEYKCKV |
| | | SNKALGAPIEKTISKAKGQPREPQVYTLPPSRDELTKNQVS |
| | | LTCLVKGFYPSDIAVEWESNGQPENNYKTTPPVLDSDGSFF |
| | | LYSKLTVDKSRWQQGNVFSCSVMHEALHNHYTQKSLSLS |
| | | PGK |
| 168 | DP47 light chain | see Table 21 |

### Example 2

### Production of Monovalent Targeted Human 4-1BB Ligand Trimer-Containing Fc Fusion Antigen Binding Molecules

[0802] The targeted and untargeted monovalent trimeric 4-1BB ligand C-terminal Fc (kih) fusion antigen binding molecule encoding sequences were cloned into a plasmid vector, which drives expression of the insert from an MPSV promoter and contains a synthetic polyA sequence located at the 3′ end of the CDS. In addition, the vector contains an EBV OriP sequence for episomal maintenance of the plasmid.

[0803] The split trimeric 4-1BB ligand Fc (kih) fusion antigen binding molecules were produced by co-transfecting HEK293-EBNA cells with the mammalian expression vectors using polyethylenimine. The cells were transfected with the corresponding expression vectors. For variants x.11, x.12, x.13, x.14 and the control molecules H, I, J and K, at a 1:1:1 ratio (“vector knob chain”: “vector hole chain”: “vector light chain”). For control D, at a ratio of 1:1:1:1 (“vector knob chain”: “vector hole chain”: “vector light chain”: “vector light chain2”) and for human IgG1, control F, at a 1:1 ratio (“vector heavy chain”: “vector light chain).

[0804] For production in 500 mL shake flasks, 300 million HEK293 EBNA cells were seeded 24 hours before transfection. For transfection cells were centrifuged for 10 minutes at 210×g, and the supernatant was replaced by 20 mL pre-warmed CD CHO medium. Expression vectors (200 μg of total DNA) were mixed in 20 mL CD CHO medium. After addition of 540 μL PEI, the solution was vortexed for 15 seconds and incubated for 10 minutes at room temperature. Afterwards, cells were mixed with the DNA/PEI solution, transferred to a 500 mL shake flask and incubated for 3 hours at 37° C. in an incubator with a 5% CO₂ atmosphere. After the incubation, 160 mL of Excell medium supplemented with 6 mM L-Glutamine, 5 g/L PEPSOY and 1.2 mM valproic acid was added and cells were cultured for 24 hours. One day after transfection 12% Feed were added. After culturing for 7 days, the supernatant was collected by centrifugation for 30-40 minutes at least 400×g. The solution was sterile filtered (0.22 μm filter), supplemented with sodium azide to a final concentration of 0.01% (w/v), and kept at 4° C.

[0805] Secreted proteins were purified from cell culture supernatants by affinity chromatography using Protein A, followed by size exclusion chromatography. For affinity chromatography, the supernatant was loaded on a MabSelect Sure column (CV=5-15 mL, resin from GE Healthcare) equilibrated with Sodium Phosphate (20 mM), Sodium Citrate (20 mM) buffer (pH 7.5). Unbound protein was removed by washing with at least 6 column volumes of the same buffer. The bound protein was eluted using either a linear gradient (20 CV) or a step elution (8 CV) with 20 mM sodium citrate, 100 mM Sodium chloride, 100 mM Glycine buffer (pH 3.0). For the linear gradient an additional 4 column volumes step elution was applied.

[0806] The pH of collected fractions was adjusted by adding 1/10 (v/v) of 0.5M sodium phosphate, pH 8.0. The protein was concentrated prior to loading on a HiLoad Superdex 200 column (GE Healthcare) equilibrated with 20 mM Histidine, 140 mM sodium chloride, 0.01% (v/v) Tween20 solution of pH 6.0.

[0807] The protein concentration was determined by measuring the optical density (OD) at 280 nm, using a molar extinction coefficient calculated on the basis of the amino acid sequence. Purity and molecular weight of the targeted trimeric 4-1BB ligand Fc (kih) fusion antigen binding molecules was analyzed by SDS-PAGE in the presence and absence of a reducing agent (5 mM 1,4-dithiotreitol) and staining with Coomassie SimpleBlue™ SafeStain (Invitrogen USA) or CE-SDS using Caliper LabChip GXII (Perkin Elmer). The aggregate content of samples was analyzed using a TSKgel G3000 SW XL analytical size-exclusion column (Tosoh) equilibrated in 25 mM K₂HPO₄, 125 mM NaCl, 200 mM L-Arginine Monohydrocloride, 0.02% (w/v) NaN₃, pH 6.7 running buffer at 25° C.

[0808] Table 39 summarizes the yield and final monomer content of the targeted split trimeric C-terminal 4-1BB ligand Fc(kih) fusion antigen binding molecules.

TABLE 39
Biochemical analysis of exemplary targeted split trimeric C-terminal
4-1BB ligand Fc(kih) fusion antigen binding molecules

| | Monomer | |
|---|---|---|
| | [%] | Yield |
| Construct | (SEC) | [mg/l] |
| monovalent targeted FAP(4B9) split trimeric C- | 97.8 | 19 |
| terminal 4-1BB ligand (71-248) Fc (kih) fusion | | |
| antigen binding molecule | | |
| Construct 2.11 | | |
| monovalent targeted CD19(8B8-018) split | 100 | 16 |
| trimeric C-terminal 4-1BB ligand (71-248) Fc | | |
| (kih) fusion antigen binding molecule | | |
| Construct 3.11 | | |
| monovalent targeted CD19(8B8-2B11) split | 100 | 6 |
| trimeric C-terminal 4-1BB ligand (71-248) Fc | | |
| (kih) fusion antigen binding molecule | | |
| Construct 4.11 | | |
| monovalent DP47-untargeted split trimeric | 99.5 | 25.9 |
| human 4-1BB ligand (71-254) Fc (kih) fusion | | |
| antigen (Control D) | | |
| germline DP47 human IgG1 PGLALA | 100 | 50 |
| Control F | | |

### Example 3

### Affinity Determination by Surface Plasmon Resonance

[0809] 3.1 Preparation, Purification and Characterization of Antigens or Surface Plasmon Resonance

[0810] Human CD19 Fc Fusion Protein

[0811] The preparation, purification and characterization of the human CD19 ectodomain fused to a human IgG1 Fc domain is described in Example 1.3.2.

[0812] Human 4-1BB

[0813] The ectodomain of human 4-1BB (Q07011, amino acid 24-186) was subcloned in frame with an avi (GLNDIFEAQKIEWHE, SEQ ID NO. 245) and a hexahistidine tag (Table 40).

TABLE 40
Sequences of monomeric human 4-1BB His molecule

| SEQ ID | | |
|---|---|---|
| NO: | antigen | Sequence |
| 207 | nucleotide | CTGCAGGACCCCTGCAGCAACTGCCCTGCCGGCACCT |
| | sequence | TCTGCGACAACAACCGGAACCAGATCTGCAGCCCCTG |
| | of human | CCCCCCCAACAGCTTCAGCTCTGCCGGCGGACAGCGG |
| | 4-1BB His | ACCTGCGACATCTGCAGACAGTGCAAGGGCGTGTTCA |
| | | GAACCCGGAAAGAGTGCAGCAGCACCAGCAACGCCG |
| | | AGTGCGACTGCACCCCCGGCTTCCATTGTCTGGGAGC |
| | | CGGCTGCAGCATGTGCGAGCAGGACTGCAAGCAGGG |
| | | CCAGGAACTGACCAAGAAGGGCTGCAAGGACTGCTG |
| | | CTTCGGCACCTTCAACGACCAGAAGCGGGGCATCTGC |
| | | CGGCCCTGGACCAACTGTAGCCTGGACGGCAAGAGCG |
| | | TGCTGGTCAACGGCACCAAAGAACGGGACGTCGTGTG |
| | | CGGCCCCAGCCCTGCTGATCTGTCTCCTGGGGCCAGC |
| | | AGCGTGACCCCTCCTGCCCCTGCCAGAGAGCCTGGCC |
| | | ACTCTCCTCAGGTCGACGAACAGTTATATTTTCAGGG |
| | | CGGCTCAGGCCTGAACGACATCTTCGAGGCCCAGAAG |
| | | ATCGAGTGGCACGAGGCTCGAGCTCACCACCATCACC |
| | | ATCAC |
| 208 | human 4- | LQDPCSNCPAGTFCDNNRNQICSPCPPNSFSSAGGQRTC |
| | 1BB His | DICRQCKGVFRTRKECSSTSNAECDCTPGFHCLGAGCSM |
| | | CEQDCKQGQELTKKGCKDCCFGTFNDQKRGICRPWTNC |
| | | SLDGKSVLVNGTKERDVVCGPSPADLSPGASSVTPPAPA |
| | | REPGHSPQVDEQLYFQGGSGLNDIFEAQKIEWHEARAH |
| | | HHHHH |

[0814] Protein production was performed as described above for the CD19 Fc fusion protein in Example 1.3.2. Secreted proteins were purified from cell culture supernatants by chelating chromatography, followed by size exclusion chromatography.

[0815] The first chromatographic step was performed on a NiNTA Superflow Cartridge (5 ml, Qiagen) equilibrated in 20 mM sodium phosphate, 500 nM sodium chloride, pH7.4. Elution was performed by applying a gradient over 12 column volume from 5% to 45% of elution buffer (20 mM sodium phosphate, 500 nM sodium chloride, 500 mM Imidazole, pH7.4).

[0816] The protein was concentrated and filtered prior to loading on a HiLoad Superdex 75 column (GE Healthcare) equilibrated with 2 mM MOPS, 150 mM sodium chloride, 0.02% (w/v) sodium azide solution of pH 7.4. Table 41 summarizes the yield and final monomer content of monomeric human avi His-tagged 4-1BB.

TABLE 41
Biochemical analysis of monomeric human 4-1BB avi His

| | Monomer [%] | Yield |
|---|---|---|
| Construct | (SEC) | [mg/l] |
| monomeric human 4-1BB avi His | 100 | 16.4 |

[0817] 3.2 Affinity Determination

[0818] Binding of targeted split trimeric C-terminal 4-1BB ligand antigen binding molecules to the recombinant 4-1BB or CD19 was assessed by surface plasmon resonance (SPR). All SPR experiments were performed on a Biacore T200 at 25° C. with HBS-EP as running buffer (0.01 M HEPES pH 7.4, 0.15 M NaCl, 3 mM EDTA, 0.005% Surfactant P20, Biacore, Freiburg/Germany).

[0819] Affinity for Human 4-1BB

[0820] Anti-human Fc antibody (Biacore, Freiburg/Germany) was directly coupled on a CMS chip at pH 5.0 using the standard amine coupling kit (Biacore, Freiburg/Germany). The immobilization level was approximately 4000 RU. Targeted split trimeric C-terminal 4-1BB ligand was captured for 90 seconds at concentration of 4 nM. Recombinant human 4-1BB avi his was passed at a concentration range from 2.7 to 2000 nM with a flow of 30 μL/minutes through the flow cells over 120 seconds. The dissociation was monitored for 120 seconds. Bulk refractive index differences were corrected for by subtracting the response obtained on reference flow cell. Here, the antigens were flown over a surface with immobilized anti-human Fc antibody but on which HBS-EP has been injected rather than the antibodies.

[0821] Affinity for Human CD19

[0822] Anti-human Fab antibody (Biacore, Freiburg/Germany) was directly coupled on a CM5 chip at pH 5.0 using the standard amine coupling kit (Biacore, Freiburg/Germany). The immobilization level was approximately 7000 RU. Targeted split trimeric C-terminal 4-1BB ligand was captured for 60 seconds at concentrations between 75 and 100 nM. Recombinant human CD19 Fc(kih) was passed at a concentration range from 7.8 to 500 nM with a flow of 30 μL/minutes through the flow cells over 220 seconds. The dissociation was monitored for 600/2500 seconds. Bulk refractive index differences were corrected for by subtracting the response obtained on reference flow cell. Here, the antigens were flown over a surface with immobilized anti-human Fc antibody but on which HBS-EP has been injected rather than the antibodies.

[0823] Kinetic constants were derived using the Biacore T200 Evaluation Software (vAA, Biacore AB, Uppsala/Sweden), to fit rate equations for 1:1 Langmuir binding by numerical integration and used to estimate qualitatively the avidity.

TABLE 42
Binding of targeted split trimeric C-terminal 4-1BB ligand antigen binding
molecules to recombinant human 4-1BB

| | Recombinant human 4-1BB | | | |
|---|---|---|---|---|
| | | | KD | KD |
| Construct | ka (1/Ms) | kd (1/s) | (M) | (M) |
| Construct 2.11 | 7.62E+04 | 2.63E−02 | 3.47E−07 | 2.079E−08 |
| Construct 4.11 | 7.37E+04 | 2.72E−02 | 3.69E−07 | 1.762E−08 |

[0824] Affinity constants for the interaction between targeted split trimeric C-terminal 4-1BB ligand antigen binding molecules and human 4-1BB avi his were determined by fitting to a 1:1 Langmuir binding. Results are the average from three experiments.

TABLE 43
Binding of targeted split trimeric C-terminal 4-1BB ligand to recombinant
human CD19

| | Recombinant human CD19 | | | |
|---|---|---|---|---|
| | ka | | KD | KD |
| Construct | (1/Ms) | kd (1/s) | (M) | (M) |
| Construct 4.11 | 5.22E+04 | 4.57E−05 | 8.85E−10 | 1.32E−10 |

[0825] Affinity constants for the interaction between targeted split trimeric C-terminal 4-1BB ligand antigen binding molecules and human CD19 Fc(kih) were determined by fitting to a 1:1 Langmuir binding. Results are the average from three experiments.

[0826] 3.3 Determination of Simultaneous Binding of Targeted C-Terminal 4-1BB Split Trimeric Ligand Fc Fusion Antigen Binding Molecules by Surface Plasmon Resonance

[0827] The capacity of binding simultaneously human 4-1BB Fc(kih) and human FAP, or human CD19, respectively was assessed by surface plasmon resonance (SPR). All SPR experiments were performed on a Biacore T200 at 25° C. with HBS-EP as running buffer (0.01 M HEPES pH 7.4, 0.15 M NaCl, 3 mM EDTA, 0.005% Surfactant P20, Biacore, Freiburg/Germany).

[0828] Biotinylated human 4-1BB Fc(kih) was directly coupled to a flow cell of a streptavidin (SA) sensor chip. Immobilization levels up to 200 resonance units (RU) were used. The targeted trimeric C-terminal 4-1BB ligand Fc (kih) fusion molecules were passed at a concentration range of 200 nM with a flow of 30 μL/minute through the flow cells over 90 seconds and dissociation was set to zero seconds. Human FAP or human CD19 Fc(kih) was injected as second analyte with a flow of 30 μL/minute through the flow cells over 90 seconds at a concentration of 500 nM (FIG. 4A). The dissociation was monitored for 120 sec. Bulk refractive index differences were corrected for by subtracting the response obtained in a reference flow cell, where no protein was immobilized. The bispecific constructs could bind simultaneously human 4-1BB and human FAP or human CD19, respectively (FIG. 4B, 4C and 4D).

### Example 4

### Preparation and Purification of FAP-Targeted/DP47 Human 4-1BB Ligand Trimer-Containing Fc Fusion Antigen Binding Molecules

[0829] 4.1 Preparation of Monovalent FAP(4B9)-Targeted/DP47 4-1BB Ligand Trimer-Containing Fc (kih) Fusion Antigen Binding Molecule, wherein the 4-1BB Ligands are C-Terminally Fused (Constructs 2.15 and 2.16) (FAP on the Hole Chain)

[0830] The DNA sequence encoding part of the ectodomain (amino acids 71-254 of human 4-1BB ligand was synthetized according to the P41273 sequence of Uniprot database.

[0831] A polypeptide containing two ectodomains of 4-1BB ligand, separated by (G4S)₂ linkers was subcloned in frame to the C-terminus of human IgG1 Fc hole or knob chain, as depicted in FIG. 1A: human IgG1 Fc, (G4S)₂ connector, human 4-1BB ligand, (G4S)₂ connector, human 4-1BB ligand. A polypeptide containing one ectodomain of 4-1BB ligand was subcloned in frame to the C-terminus of human IgG1 Fc knob or hole chain as described in FIG. 1B: human IgG1 Fc, (G4S)₂ connector, human 4-1BB ligand.

[0832] The variable region of heavy and light chain DNA sequences encoding a binder specific for fibroblast activation protein (FAP), clone 4B9, were subcloned in frame with either the constant heavy chain of the hole or the constant light chain of human IgG1. The variable region of heavy and light chain DNA sequences encoding a non-binding clone, clone DP47, were subcloned in frame with either the constant heavy chain of the knob or the constant light chain of human IgG1. The crossmab technology was applied to reduce the formation of wrongly paired light chains (International patent application No. WO 2010/145792 A1). In this example a crossed Fab unit (VHCL) of the binder DP47 was fused to the knob chain.

[0833] The Pro329Gly, Leu234Ala and Leu235Ala mutations have been introduced in the constant region of the knob and hole heavy chains to abrogate binding to Fc gamma receptors (International Patent Appl. Publ. No. WO 2012/130831 A1).

[0834] Combination of the anti-FAP huIgG1 Fc hole chain containing the Y349C/T366S/L368A/Y407V mutations, the DP47 huIgG1 Fc knob chain containing the S354C/T366W mutations and the two light chains, anti-FAP and DP47, allows generation of a heterodimer, which includes an assembled trimeric 4-1BB ligand, one FAP binding Fab and one non binding DP47 Fab (FIGS. 5A and 5B).

[0835] Table 44 shows the cDNA and amino acid sequences of the monovalent FAP(4B9)-targeted 4-1BB ligand (71-254) trimer-containing Fc (kih) fusion antigen binding molecule, wherein the dimeric 4-1BBL is fused to the hole chain (Construct 2.15).

TABLE 44
Sequences of FAP(4B9)-targeted/DP47 human 4-1BB
ligand trimer containing Fc (kih) fusion antigen binding
molecule Construct 2.15

| SEQ ID | | |
|---|---|---|
| NO: | Description | Sequence |
| 209 | nucleotide | GAGGTGCAGCTGCTCGAAAGCGGCGGAGGACTGGTGCA |
| | sequence of anti- | GCCTGGCGGCAGCCTGAGACTGTCTTGCGCCGCCAGCG |
| | FAP(4B9) Fc | GCTTCACCTTCAGCAGCTACGCCATGAGCTGGGTCCGCC |
| | hole dimeric 4- | AGGCCCCTGGCAAGGGACTGGAATGGGTGTCCGCCATC |
| | 1BB ligand (71- | ATCGGCTCTGGCGCCAGCACCTACTACGCCGACAGCGTG |
| | 254) chain | AAGGGCCGGTTCACCATCAGCCGGGACAACAGCAAGAA |
| | | CACCCTGTACCTGCAGATGAACAGCCTGCGGGCCGAGG |
| | | ACACCGCCGTGTACTACTGCGCCAAGGGATGGTTCGGC |
| | | GGCTTCAACTACTGGGGACAGGGCACCCTGGTCACAGT |
| | | GTCCAGCGCTAGCACCAAGGGCCCCTCCGTGTTCCCCCT |
| | | GGCCCCCAGCAGCAAGAGCACCAGCGGCGGCACAGCCG |
| | | CTCTGGGCTGCCTGGTCAAGGACTACTTCCCCGAGCCCG |
| | | TGACCGTGTCCTGGAACAGCGGAGCCCTGACCTCCGGC |
| | | GTGCACACCTTCCCCGCCGTGCTGCAGAGTTCTGGCCTG |
| | | TATAGCCTGAGCAGCGTGGTCACCGTGCCTTCTAGCAGC |
| | | CTGGGCACCCAGACCTACATCTGCAACGTGAACCACAA |
| | | GCCCAGCAACACCAAGGTGGACAAGAAGGTGGAGCCCA |
| | | AGAGCTGCGACAAAACTCACACATGCCCACCGTGCCCA |
| | | GCACCTGAAGCTGCAGGGGGACCGTCAGTCTTCCTCTTC |
| | | CCCCCAAAACCCAAGGACACCCTCATGATCTCCCGGACC |
| | | CCTGAGGTCACATGCGTGGTGGTGGACGTGAGCCACGA |
| | | AGACCCTGAGGTCAAGTTCAACTGGTACGTGGACGGCG |
| | | TGGAGGTGCATAATGCCAAGACAAAGCCGCGGGAGGAG |
| | | CAGTACAACAGCACGTACCGTGTGGTCAGCGTCCTCACC |
| | | GTCCTGCACCAGGACTGGCTGAATGGCAAGGAGTACAA |
| | | GTGCAAGGTCTCCAACAAAGCCCTCGGCGCCCCCATCG |
| | | AGAAAACCATCTCCAAAGCCAAAGGGCAGCCCCGAGAA |
| | | CCACAGGTGTGCACCCTGCCCCCATCCCGGGATGAGCTG |
| | | ACCAAGAACCAGGTCAGCCTCTCGTGCGCAGTCAAAGG |
| | | CTTCTATCCCAGCGACATCGCCGTGGAGTGGGAGAGCA |
| | | ATGGGCAGCCGGAGAACAACTACAAGACCACGCCTCCC |
| | | GTGCTGGACTCCGACGGCTCCTTCTTCCTCGTGAGCAAG |
| | | CTCACCGTGGACAAGAGCAGGTGGCAGCAGGGGAACGT |
| | | CTTCTCATGCTCCGTGATGCATGAGGCTCTGCACAACCA |
| | | CTACACGCAGAAGAGCCTCTCCCTGTCTCCGGGTGGAGG |
| | | CGGCGGAAGCGGAGGAGGAGGATCCAGAGAGGGCCCT |
| | | GAGCTGAGCCCCGATGATCCTGCTGGACTGCTGGACCTG |
| | | CGGCAGGGCATGTTTGCTCAGCTGGTGGCCCAGAACGTG |
| | | CTGCTGATCGATGGCCCCCTGTCCTGGTACAGCGATCCT |
| | | GGACTGGCTGGCGTGTCACTGACAGGCGGCCTGAGCTA |
| | | CAAAGAGGACACCAAAGAACTGGTGGTGGCCAAGGCCG |
| | | GCGTGTACTACGTGTTCTTTCAGCTGGAACTGCGGAGAG |
| | | TGGTGGCCGGCGAAGGATCTGGCTCTGTGTCTCTGGCCC |
| | | TGCATCTGCAGCCTCTGAGAAGCGCTGCTGGCGCTGCAG |
| | | CTCTGGCACTGACAGTGGATCTGCCTCCTGCCAGCTCCG |
| | | AGGCCCGGAATAGCGCATTTGGGTTTCAAGGCAGGCTG |
| | | CTGCACCTGTCTGCCGGCCAGAGGCTGGGAGTGCATCTG |
| | | CACACAGAGGCCAGGGCTAGACACGCCTGGCAGCTGAC |
| | | ACAGGGCGCTACAGTGCTGGGCCTGTTCAGAGTGACCC |
| | | CCGAGATTCCAGCCGGCCTGCCTTCTCCAAGAAGCGAA |
| | | GGCGGAGGCGGATCTGGCGGCGGAGGATCTAGAGAGGG |
| | | ACCCGAACTGTCCCCTGACGATCCAGCCGGGCTGCTGGA |
| | | TCTGAGACAGGGAATGTTCGCCCAGCTGGTGGCTCAGA |
| | | ATGTGCTGCTGATTGACGGACCTCTGAGCTGGTACTCCG |
| | | ACCCAGGGCTGGCAGGGGTGTCCCTGACTGGGGGACTG |
| | | TCCTACAAAGAAGATACAAAAGAACTGGTGGTGGCTAA |
| | | AGCTGGGGTGTACTATGTGTTTTTTCAGCTGGAACTGAG |
| | | GCGGGTGGTGGCTGGGGAGGGCTCAGGATCTGTGTCCCT |
| | | GGCTCTGCATCTGCAGCCACTGCGCTCTGCTGCTGGCGC |
| | | AGCTGCACTGGCTCTGACTGTGGACCTGCCACCAGCCTC |
| | | TAGCGAGGCCAGAAACAGCGCCTTCGGGTTCCAAGGAC |
| | | GCCTGCTGCATCTGAGCGCCGGACAGCGCCTGGGAGTG |
| | | CATCTGCATACTGAAGCCAGAGCCCGGCATGCTTGGCA |
| | | GCTGACTCAGGGGGCAACTGTGCTGGGACTGTTTCGCGT |
| | | GACACCTGAGATCCCTGCCGGACTGCCAAGCCCTAGATC |
| | | AGAA |
| 210 | nucleotide | GAGGTGCAATTGTTGGAGTCTGGGGGAGGCTTGGTACA |
| | sequence of DP47 | GCCTGGGGGGTCCCTGAGACTCTCCTGTGCAGCCTCCGG |
| | (VHCL) Fc knob | ATTCACCTTTAGCAGTTATGCCATGAGCTGGGTCCGCCA |
| | monomeric 4- | GGCTCCAGGGAAGGGGCTGGAGTGGGTCTCAGCTATTA |
| | 1BB (71-254) | GTGGTAGTGGTGGTAGCACATACTACGCAGACTCCGTGA |
| | ligand | AGGGCCGGTTCACCATCTCCAGAGACAATTCCAAGAAC |
| | | ACGCTGTATCTGCAGATGAACAGCCTGAGAGCCGAGGA |
| | | CACGGCCGTATATTACTGTGCGAAAGGCAGCGGATTTGA |
| | | CTACTGGGGCCAAGGAACCCTGGTCACCGTCTCGAGCG |
| | | CTAGTGTGGCCGCTCCCTCCGTGTTTATCTTTCCCCCATC |
| | | CGATGAACAGCTGAAAAGCGGCACCGCCTCCGTCGTGT |
| | | GTCTGCTGAACAATTTTTACCCTAGGGAAGCTAAAGTGC |
| | | AGTGGAAAGTGGATAACGCACTGCAGTCCGGCAACTCC |
| | | CAGGAATCTGTGACAGAACAGGACTCCAAGGACAGCAC |
| | | CTACTCCCTGTCCTCCACCCTGACACTGTCTAAGGCTGA |
| | | TTATGAGAAACACAAAGTCTACGCCTGCGAAGTCACCC |
| | | ATCAGGGCCTGAGCTCGCCCGTCACAAAGAGCTTCAAC |
| | | AGGGGAGAGTGTGACAAGACCCACACCTGTCCCCCTTG |
| | | TCCTGCCCCTGAAGCTGCTGGCGGCCCTTCTGTGTTCCT |
| | | GTTCCCCCCAAAGCCCAAGGACACCCTGATGATCAGCC |
| | | GGACCCCCGAAGTGACCTGCGTGGTGGTGGATGTGTCCC |
| | | ACGAGGACCCTGAAGTGAAGTTCAATTGGTACGTGGAC |
| | | GGCGTGGAAGTGCACAACGCCAAGACAAAGCCGCGGGA |
| | | GGAGCAGTACAACAGCACGTACCGTGTGGTCAGCGTCC |
| | | TCACCGTCCTGCACCAGGACTGGCTGAATGGCAAGGAG |
| | | TACAAGTGCAAGGTCTCCAACAAAGCCCTCGGCGCCCC |
| | | CATCGAGAAAACCATCTCCAAAGCCAAAGGGCAGCCCC |
| | | GAGAACCACAGGTGTACACCCTGCCCCCCTGCAGAGAT |
| | | GAGCTGACCAAGAACCAGGTGTCCCTGTGGTGTCTGGTC |
| | | AAGGGCTTCTACCCCAGCGATATCGCCGTGGAGTGGGA |
| | | GAGCAACGGCCAGCCTGAGAACAACTACAAGACCACCC |
| | | CCCCTGTGCTGGACAGCGACGGCAGCTTCTTCCTGTACT |
| | | CCAAACTGACCGTGGACAAGAGCCGGTGGCAGCAGGGC |
| | | AACGTGTTCAGCTGCAGCGTGATGCACGAGGCCCTGCA |
| | | CAACCACTACACCCAGAAGTCCCTGAGCCTGAGCCCCG |
| | | GCGGAGGCGGCGGAAGCGGAGGAGGAGGATCCAGAGA |
| | | GGGCCCTGAGCTGAGCCCCGATGATCCTGCTGGACTGCT |
| | | GGACCTGCGGCAGGGCATGTTTGCTCAGCTGGTGGCCCA |
| | | GAACGTGCTGCTGATCGATGGCCCCCTGTCCTGGTACAG |
| | | CGATCCTGGACTGGCTGGCGTGTCACTGACAGGCGGCCT |
| | | GAGCTACAAAGAGGACACCAAAGAACTGGTGGTGGCCA |
| | | AGGCCGGCGTGTACTACGTGTTCTTTCAGCTGGAACTGC |
| | | GGAGAGTGGTGGCCGGCGAAGGATCTGGCTCTGTGTCTC |
| | | TGGCCCTGCATCTGCAGCCTCTGAGAAGCGCTGCTGGCG |
| | | CTGCAGCTCTGGCACTGACAGTGGATCTGCCTCCTGCCA |
| | | GCTCCGAGGCCCGGAATAGCGCATTTGGGTTTCAAGGCA |
| | | GGCTGCTGCACCTGTCTGCCGGCCAGAGGCTGGGAGTG |
| | | CATCTGCACACAGAGGCCAGGGCTAGACACGCCTGGCA |
| | | GCTGACACAGGGCGCTACAGTGCTGGGCCTGTTCAGAGT |
| | | GACCCCCGAGATTCCAGCCGGCCTGCCTTCTCCAAGAAG |
| | | CGAA |
| 103 | nucleotide | see Table 1 |
| | sequence of anti- | |
| | FAP(4B9) light | |
| | chain | |
| 211 | nucleotide | GAAATCGTGTTAACGCAGTCTCCAGGCACCCTGTCTTTG |
| | sequence of DP47 | TCTCCAGGGGAAAGAGCCACCCTCTCTTGCAGGGCCAGT |
| | (VL-CH1) light | CAGAGTGTTAGCAGCAGCTACTTAGCCTGGTACCAGCAG |
| | chain | AAACCTGGCCAGGCTCCCAGGCTCCTCATCTATGGAGCA |
| | | TCCAGCAGGGCCACTGGCATCCCAGACAGGTTCAGTGG |
| | | CAGTGGATCCGGGACAGACTTCACTCTCACCATCAGCAG |
| | | ACTGGAGCCTGAAGATTTTGCAGTGTATTACTGTCAGCA |
| | | GTATGGTAGCTCACCGCTGACGTTCGGCCAGGGGACCA |
| | | AAGTGGAAATCAAGAGCTCCGCTAGCACCAAAGGCCCT |
| | | TCCGTGTTTCCTCTGGCTCCTAGCTCCAAGTCCACCTCTG |
| | | GAGGCACCGCTGCTCTCGGATGCCTCGTGAAGGATTATT |
| | | TTCCTGAGCCTGTGACAGTGTCCTGGAATAGCGGAGCAC |
| | | TGACCTCTGGAGTGCATACTTTCCCCGCTGTGCTGCAGT |
| | | CCTCTGGACTGTACAGCCTGAGCAGCGTGGTGACAGTGC |
| | | CCAGCAGCAGCCTGGGCACCCAGACCTACATCTGCAAC |
| | | GTGAACCACAAGCCCAGCAACACCAAGGTGGACAAGAA |
| | | GGTGGAACCCAAGTCTTGT |
| 212 | anti-FAP(4B9) Fc | EVQLLESGGGLVQPGGSLRLSCAASGFTFSSYAMSWVRQA |
| | hole dimeric 4- | PGKGLEWVSAIIGSGASTYYADSVKGRFTISRDNSKNTLYL |
| | 1BB ligand (71- | QMNSLRAEDTAVYYCAKGWFGGFNYWGQGTLVTVSSAS |
| | 254) chain | TKGPSVFPLAPSSKSTSGGTAALGCLVKDYFPEPVTVSWNS |
| | | GALTSGVHTFPAVLQSSGLYSLSSVVTVPSSSLGTQTYICN |
| | | VNHKPSNTKVDKKVEPKSCDKTHTCPPCPAPEAAGGPSVF |
| | | LFPPKPKDTLMISRTPEVTCVVVDVSHEDPEVKFNWYVDG |
| | | VEVHNAKTKPREEQYNSTYRVVSVLTVLHQDWLNGKEYK |
| | | CKVSNKALGAPIEKTISKAKGQPREPQVCTLPPSRDELTKN |
| | | QVSLSCAVKGFYPSDIAVEWESNGQPENNYKTTPPVLDSD |
| | | GSFFLVSKLTVDKSRWQQGNVFSCSVMHEALHNHYTQKS |
| | | LSLSPGGGGGSGGGGSREGPELSPDDPAGLLDLRQGMFAQ |
| | | LVAQNVLLIDGPLSWYSDPGLAGVSLTGGLSYKEDTKELV |
| | | VAKAGVYYVFFQLELRRVVAGEGSGSVSLALHLQPLRSAA |
| | | GAAALALTVDLPPASSEARNSAFGFQGRLLHLSAGQRLGV |
| | | HLHTEARARHAWQLTQGATVLGLFRVTPEIPAGLPSPRSEG |
| | | GGGSGGGGSREGPELSPDDPAGLLDLRQGMFAQLVAQNV |
| | | LLIDGPLSWYSDPGLAGVSLTGGLSYKEDTKELVVAKAGV |
| | | YYVFFQLELRRVVAGEGSGSVSLALHLQPLRSAAGAAALA |
| | | LTVDLPPASSEARNSAFGFQGRLLHLSAGQRLGVHLHTEA |
| | | RARHAWQLTQGATVLGLFRVTPEIPAGLPSPRSE |
| 213 | DP47 (VH-CL) | EVQLLESGGGLVQPGGSLRLSCAASGFTFSSYAMSWVRQA |
| | Fc knob | PGKGLEWVSAISGSGGSTYYADSVKGRFTISRDNSKNTLYL |
| | monomeric 4- | QMNSLRAEDTAVYYCAKGSGFDYWGQGTLVTVSSASVA |
| | 1BB (71-254) | APSVFIFPPSDEQLKSGTASVVCLLNNFYPREAKVQWKVD |
| | ligand | NALQSGNSQESVTEQDSKDSTYSLSSTLTLSKADYEKHKV |
| | | YACEVTHQGLSSPVTKSFNRGECDKTHTCPPCPAPEAAGG |
| | | PSVFLFPPKPKDTLMISRTPEVTCVVVDVSHEDPEVKFNWY |
| | | VDGVEVHNAKTKPREEQYNSTYRVVSVLTVLHQDWLNG |
| | | KEYKCKVSNKALGAPIEKTISKAKGQPREPQVYTLPPCRDE |
| | | LTKNQVSLWCLVKGFYPSDIAVEWESNGQPENNYKTTPPV |
| | | LDSDGSFFLYSKLTVDKSRWQQGNVFSCSVMHEALHNHY |
| | | TQKSLSLSPGGGGGSGGGGSREGPELSPDDPAGLLDLRQG |
| | | MFAQLVAQNVLLIDGPLSWYSDPGLAGVSLTGGLSYKEDT |
| | | KELVVAKAGVYYVFFQLELRRVVAGEGSGSVSLALHLQPL |
| | | RSAAGAAALALTVDLPPASSEARNSAFGFQGRLLHLSAGQ |
| | | RLGVHLHTEARARHAWQLTQGATVLGLFRVTPEIPAGLPS |
| | | PRSE |
| 106 | anti-FAP(4B9) | see Table 1 |
| | light chain | |
| 214 | DP47 (VL-CH1) | EIVLTQSPGTLSLSPGERATLSCRASQSVSSSYLAWYQQKP |
| | light chain | GQAPRLLIYGASSRATGIPDRFSGSGSGTDFTLTISRLEPEDF |
| | | AVYYCQQYGSSPLTFGQGTKVEIKSSASTKGPSVFPLAPSS |
| | | KSTSGGTAALGCLVKDYFPEPVTVSWNSGALTSGVHTFPA |
| | | VLQSSGLYSLSSVVTVPSSSLGTQTYICNVNHKPSNTKVDK |
| | | KVEPKSC |

[0836] Table 45 shows the cDNA and amino acid sequences of the monovalent FAP(4B9)-targeted/DP47 4-1BB ligand (71-254) trimer-containing Fc (kih) fusion antigen binding molecule, wherein the dimeric 4-1BBL is fused to the Fc knob chain (Construct 2.16).

TABLE 45
Sequences of FAP(4B9)-targeted human 4-1BB ligand trimer
containing Fc (kih) fusion molecule Construct 2.16

| SEQ ID | | |
|---|---|---|
| NO: | Description | Sequence |
| 215 | nucleotide | GAGGTGCAGCTGCTCGAAAGCGGCGGAGGACTGGTGCA |
| | sequence of anti- | GCCTGGCGGCAGCCTGAGACTGTCTTGCGCCGCCAGCG |
| | FAP(4B9) Fc | GCTTCACCTTCAGCAGCTACGCCATGAGCTGGGTCCGCC |
| | hole monomeric | AGGCCCCTGGCAAGGGACTGGAATGGGTGTCCGCCATC |
| | 4-1BBL (71-254) | ATCGGCTCTGGCGCCAGCACCTACTACGCCGACAGCGTG |
| | chain | AAGGGCCGGTTCACCATCAGCCGGGACAACAGCAAGAA |
| | | CACCCTGTACCTGCAGATGAACAGCCTGCGGGCCGAGG |
| | | ACACCGCCGTGTACTACTGCGCCAAGGGATGGTTCGGC |
| | | GGCTTCAACTACTGGGGACAGGGCACCCTGGTCACAGT |
| | | GTCCAGCGCTAGCACCAAGGGCCCCTCCGTGTTCCCCCT |
| | | GGCCCCCAGCAGCAAGAGCACCAGCGGCGGCACAGCCG |
| | | CTCTGGGCTGCCTGGTCAAGGACTACTTCCCCGAGCCCG |
| | | TGACCGTGTCCTGGAACAGCGGAGCCCTGACCTCCGGC |
| | | GTGCACACCTTCCCCGCCGTGCTGCAGAGTTCTGGCCTG |
| | | TATAGCCTGAGCAGCGTGGTCACCGTGCCTTCTAGCAGC |
| | | CTGGGCACCCAGACCTACATCTGCAACGTGAACCACAA |
| | | GCCCAGCAACACCAAGGTGGACAAGAAGGTGGAGCCCA |
| | | AGAGCTGCGACAAAACTCACACATGCCCACCGTGCCCA |
| | | GCACCTGAAGCTGCAGGGGGACCGTCAGTCTTCCTCTTC |
| | | CCCCCAAAACCCAAGGACACCCTCATGATCTCCCGGACC |
| | | CCTGAGGTCACATGCGTGGTGGTGGACGTGAGCCACGA |
| | | AGACCCTGAGGTCAAGTTCAACTGGTACGTGGACGGCG |
| | | TGGAGGTGCATAATGCCAAGACAAAGCCGCGGGAGGAG |
| | | CAGTACAACAGCACGTACCGTGTGGTCAGCGTCCTCACC |
| | | GTCCTGCACCAGGACTGGCTGAATGGCAAGGAGTACAA |
| | | GTGCAAGGTCTCCAACAAAGCCCTCGGCGCCCCCATCG |
| | | AGAAAACCATCTCCAAAGCCAAAGGGCAGCCCCGAGAA |
| | | CCACAGGTGTGCACCCTGCCCCCATCCCGGGATGAGCTG |
| | | ACCAAGAACCAGGTCAGCCTCTCGTGCGCAGTCAAAGG |
| | | CTTCTATCCCAGCGACATCGCCGTGGAGTGGGAGAGCA |
| | | ATGGGCAGCCGGAGAACAACTACAAGACCACGCCTCCC |
| | | GTGCTGGACTCCGACGGCTCCTTCTTCCTCGTGAGCAAG |
| | | CTCACCGTGGACAAGAGCAGGTGGCAGCAGGGGAACGT |
| | | CTTCTCATGCTCCGTGATGCATGAGGCTCTGCACAACCA |
| | | CTACACGCAGAAGAGCCTCTCCCTGTCTCCGGGTGGAGG |
| | | CGGCGGAAGCGGAGGAGGAGGATCCAGAGAGGGCCCT |
| | | GAGCTGAGCCCCGATGATCCTGCTGGACTGCTGGACCTG |
| | | CGGCAGGGCATGTTTGCTCAGCTGGTGGCCCAGAACGTG |
| | | CTGCTGATCGATGGCCCCCTGTCCTGGTACAGCGATCCT |
| | | GGACTGGCTGGCGTGTCACTGACAGGCGGCCTGAGCTA |
| | | CAAAGAGGACACCAAAGAACTGGTGGTGGCCAAGGCCG |
| | | GCGTGTACTACGTGTTCTTTCAGCTGGAACTGCGGAGAG |
| | | TGGTGGCCGGCGAAGGATCTGGCTCTGTGTCTCTGGCCC |
| | | TGCATCTGCAGCCTCTGAGAAGCGCTGCTGGCGCTGCAG |
| | | CTCTGGCACTGACAGTGGATCTGCCTCCTGCCAGCTCCG |
| | | AGGCCCGGAATAGCGCATTTGGGTTTCAAGGCAGGCTG |
| | | CTGCACCTGTCTGCCGGCCAGAGGCTGGGAGTGCATCTG |
| | | CACACAGAGGCCAGGGCTAGACACGCCTGGCAGCTGAC |
| | | ACAGGGCGCTACAGTGCTGGGCCTGTTCAGAGTGACCC |
| | | CCGAGATTCCAGCCGGCCTGCCTTCTCCAAGAAGCGAA |
| 216 | nucleotide | GAGGTGCAATTGTTGGAGTCTGGGGGAGGCTTGGTACA |
| | sequence of DP47 | GCCTGGGGGGTCCCTGAGACTCTCCTGTGCAGCCTCCGG |
| | (VH-CL) Fc knob | ATTCACCTTTAGCAGTTATGCCATGAGCTGGGTCCGCCA |
| | dimeric 4-1BB | GGCTCCAGGGAAGGGGCTGGAGTGGGTCTCAGCTATTA |
| | ligand (71-254) | GTGGTAGTGGTGGTAGCACATACTACGCAGACTCCGTGA |
| | chain | AGGGCCGGTTCACCATCTCCAGAGACAATTCCAAGAAC |
| | | ACGCTGTATCTGCAGATGAACAGCCTGAGAGCCGAGGA |
| | | CACGGCCGTATATTACTGTGCGAAAGGCAGCGGATTTGA |
| | | CTACTGGGGCCAAGGAACCCTGGTCACCGTCTCGAGCG |
| | | CTAGTGTGGCCGCTCCCTCCGTGTTTATCTTTCCCCCATC |
| | | CGATGAACAGCTGAAAAGCGGCACCGCCTCCGTCGTGT |
| | | GTCTGCTGAACAATTTTTACCCTAGGGAAGCTAAAGTGC |
| | | AGTGGAAAGTGGATAACGCACTGCAGTCCGGCAACTCC |
| | | CAGGAATCTGTGACAGAACAGGACTCCAAGGACAGCAC |
| | | CTACTCCCTGTCCTCCACCCTGACACTGTCTAAGGCTGA |
| | | TTATGAGAAACACAAAGTCTACGCCTGCGAAGTCACCC |
| | | ATCAGGGCCTGAGCTCGCCCGTCACAAAGAGCTTCAAC |
| | | AGGGGAGAGTGTGACAAGACCCACACCTGTCCCCCTTG |
| | | TCCTGCCCCTGAAGCTGCTGGCGGCCCTTCTGTGTTCCT |
| | | GTTCCCCCCAAAGCCCAAGGACACCCTGATGATCAGCC |
| | | GGACCCCCGAAGTGACCTGCGTGGTGGTGGATGTGTCCC |
| | | ACGAGGACCCTGAAGTGAAGTTCAATTGGTACGTGGAC |
| | | GGCGTGGAAGTGCACAACGCCAAGACAAAGCCGCGGGA |
| | | GGAGCAGTACAACAGCACGTACCGTGTGGTCAGCGTCC |
| | | TCACCGTCCTGCACCAGGACTGGCTGAATGGCAAGGAG |
| | | TACAAGTGCAAGGTCTCCAACAAAGCCCTCGGCGCCCC |
| | | CATCGAGAAAACCATCTCCAAAGCCAAAGGGCAGCCCC |
| | | GAGAACCACAGGTGTACACCCTGCCCCCCTGCAGAGAT |
| | | GAGCTGACCAAGAACCAGGTGTCCCTGTGGTGTCTGGTC |
| | | AAGGGCTTCTACCCCAGCGATATCGCCGTGGAGTGGGA |
| | | GAGCAACGGCCAGCCTGAGAACAACTACAAGACCACCC |
| | | CCCCTGTGCTGGACAGCGACGGCAGCTTCTTCCTGTACT |
| | | CCAAACTGACCGTGGACAAGAGCCGGTGGCAGCAGGGC |
| | | AACGTGTTCAGCTGCAGCGTGATGCACGAGGCCCTGCA |
| | | CAACCACTACACCCAGAAGTCCCTGAGCCTGAGCCCCG |
| | | GCGGAGGCGGCGGAAGCGGAGGAGGAGGATCCAGAGA |
| | | GGGCCCTGAGCTGAGCCCCGATGATCCTGCTGGACTGCT |
| | | GGACCTGCGGCAGGGCATGTTTGCTCAGCTGGTGGCCCA |
| | | GAACGTGCTGCTGATCGATGGCCCCCTGTCCTGGTACAG |
| | | CGATCCTGGACTGGCTGGCGTGTCACTGACAGGCGGCCT |
| | | GAGCTACAAAGAGGACACCAAAGAACTGGTGGTGGCCA |
| | | AGGCCGGCGTGTACTACGTGTTCTTTCAGCTGGAACTGC |
| | | GGAGAGTGGTGGCCGGCGAAGGATCTGGCTCTGTGTCTC |
| | | TGGCCCTGCATCTGCAGCCTCTGAGAAGCGCTGCTGGCG |
| | | CTGCAGCTCTGGCACTGACAGTGGATCTGCCTCCTGCCA |
| | | GCTCCGAGGCCCGGAATAGCGCATTTGGGTTTCAAGGCA |
| | | GGCTGCTGCACCTGTCTGCCGGCCAGAGGCTGGGAGTG |
| | | CATCTGCACACAGAGGCCAGGGCTAGACACGCCTGGCA |
| | | GCTGACACAGGGCGCTACAGTGCTGGGCCTGTTCAGAGT |
| | | GACCCCCGAGATTCCAGCCGGCCTGCCTTCTCCAAGAAG |
| | | CGAAGGCGGAGGCGGATCTGGCGGCGGAGGATCTAGAG |
| | | AGGGACCCGAACTGTCCCCTGACGATCCAGCCGGGCTG |
| | | CTGGATCTGAGACAGGGAATGTTCGCCCAGCTGGTGGCT |
| | | CAGAATGTGCTGCTGATTGACGGACCTCTGAGCTGGTAC |
| | | TCCGACCCAGGGCTGGCAGGGGTGTCCCTGACTGGGGG |
| | | ACTGTCCTACAAAGAAGATACAAAAGAACTGGTGGTGG |
| | | CTAAAGCTGGGGTGTACTATGTGTTTTTTCAGCTGGAAC |
| | | TGAGGCGGGTGGTGGCTGGGGAGGGCTCAGGATCTGTG |
| | | TCCCTGGCTCTGCATCTGCAGCCACTGCGCTCTGCTGCT |
| | | GGCGCAGCTGCACTGGCTCTGACTGTGGACCTGCCACCA |
| | | GCCTCTAGCGAGGCCAGAAACAGCGCCTTCGGGTTCCA |
| | | AGGACGCCTGCTGCATCTGAGCGCCGGACAGCGCCTGG |
| | | GAGTGCATCTGCATACTGAAGCCAGAGCCCGGCATGCTT |
| | | GGCAGCTGACTCAGGGGGCAACTGTGCTGGGACTGTTTC |
| | | GCGTGACACCTGAGATCCCTGCCGGACTGCCAAGCCCTA |
| | | GATCAGAA |
| 103 | nucleotide | See Table 1 |
| | sequence of anti- | |
| | FAP(4B9) light | |
| | chain | |
| 211 | nucleotide | see Table 42 |
| | sequence of DP47 | |
| | (VL-CH1) light | |
| | chain | |
| 217 | anti-FAP(4B9) Fc | EVQLLESGGGLVQPGGSLRLSCAASGFTFSSYAMSWVRQA |
| | hole monomeric | PGKGLEWVSAIIGSGASTYYADSVKGRFTISRDNSKNTLYL |
| | 4-1BBL (71-254) | QMNSLRAEDTAVYYCAKGWFGGFNYWGQGTLVTVSSAS |
| | chain | TKGPSVFPLAPSSKSTSGGTAALGCLVKDYFPEPVTVSWNS |
| | | GALTSGVHTFPAVLQSSGLYSLSSVVTVPSSSLGTQTYICN |
| | | VNHKPSNTKVDKKVEPKSCDKTHTCPPCPAPEAAGGPSVF |
| | | LFPPKPKDTLMISRTPEVTCVVVDVSHEDPEVKFNWYVDG |
| | | VEVHNAKTKPREEQYNSTYRVVSVLTVLHQDWLNGKEYK |
| | | CKVSNKALGAPIEKTISKAKGQPREPQVCTLPPSRDELTKN |
| | | QVSLSCAVKGFYPSDIAVEWESNGQPENNYKTTPPVLDSD |
| | | GSFFLVSKLTVDKSRWQQGNVFSCSVMHEALHNHYTQKS |
| | | LSLSPGGGGGSGGGGSREGPELSPDDPAGLLDLRQGMFAQ |
| | | LVAQNVLLIDGPLSWYSDPGLAGVSLTGGLSYKEDTKELV |
| | | VAKAGVYYVFFQLELRRVVAGEGSGSVSLALHLQPLRSAA |
| | | GAAALALTVDLPPASSEARNSAFGFQGRLLHLSAGQRLGV |
| | | HLHTEARARHAWQLTQGATVLGLFRVTPEIPAGLPSPRSE |
| 218 | DP47 (VH-CL) | EVQLLESGGGLVQPGGSLRLSCAASGFTFSSYAMSWVRQA |
| | Fc knob dimeric | PGKGLEWVSAISGSGGSTYYADSVKGRFTISRDNSKNTLYL |
| | 4-1BB ligand (71- | QMNSLRAEDTAVYYCAKGSGFDYWGQGTLVTVSSASVA |
| | 254) chain | APSVFIFPPSDEQLKSGTASVVCLLNNFYPREAKVQWKVD |
| | | NALQSGNSQESVTEQDSKDSTYSLSSTLTLSKADYEKHKV |
| | | YACEVTHQGLSSPVTKSFNRGECDKTHTCPPCPAPEAAGG |
| | | PSVFLFPPKPKDTLMISRTPEVTCVVVDVSHEDPEVKFNWY |
| | | VDGVEVHNAKTKPREEQYNSTYRVVSVLTVLHQDWLNG |
| | | KEYKCKVSNKALGAPIEKTISKAKGQPREPQVYTLPPCRDE |
| | | LTKNQVSLWCLVKGFYPSDIAVEWESNGQPENNYKTTPPV |
| | | LDSDGSFFLYSKLTVDKSRWQQGNVFSCSVMHEALHNHY |
| | | TQKSLSLSPGGGGGSGGGGSREGPELSPDDPAGLLDLRQG |
| | | MFAQLVAQNVLLIDGPLSWYSDPGLAGVSLTGGLSYKEDT |
| | | KELVVAKAGVYYVFFQLELRRVVAGEGSGSVSLALHLQPL |
| | | RSAAGAAALALTVDLPPASSEARNSAFGFQGRLLHLSAGQ |
| | | RLGVHLHTEARARHAWQLTQGATVLGLFRVTPEIPAGLPS |
| | | PRSEGGGGSGGGGSREGPELSPDDPAGLLDLRQGMFAQLV |
| | | AQNVLLIDGPLSWYSDPGLAGVSLTGGLSYKEDTKELVVA |
| | | KAGVYYVFFQLELRRVVAGEGSGSVSLALHLQPLRSAAGA |
| | | AALALTVDLPPASSEARNSAFGFQGRLLHLSAGQRLGVHL |
| | | HTEARARHAWQLTQGATVLGLFRVTPEIPAGLPSPRSE |
| 106 | anti-FAP(4B9) | See Table 1 |
| | light chain | |
| 214 | DP47 (VL-CH1) | see Table 42 |
| | light chain | |

[0837] 4.2 Preparation of Monovalent FAP(4B9)-Targeted/DP47 4-1BB Ligand Trimer-Containing Fc (kih) Fusion Antigen Binding Molecule, wherein the 4-1BB Ligands are C-Terminally Fused (Constructs 2.17 and 2.18) (FAP on the Knob Chain)

[0838] The DNA sequence encoding part of the ectodomain (amino acids 71-254) of human 4-1BB ligand was synthetized according to the P41273 sequence of Uniprot database.

[0839] A polypeptide containing two ectodomains of 4-1BB ligand, separated by (G4S)₂ linkers was subcloned in frame to the C-terminus of human IgG1 Fc hole or knob chain, as depicted in FIG. 1A: human IgG1 Fc, (G4S)₂ connector, human 4-1BB ligand, (G4S)₂ connector, human 4-1BB ligand. A polypeptide containing one ectodomain of 4-1BB ligand was subcloned in frame to the C-terminus of human IgG1 Fc knob or hole chain as described in FIG. 1B: human

[0840] IgG1 Fc, (G4S)₂ connector, human 4-1BB ligand.

[0841] The variable region of heavy and light chain DNA sequences encoding a binder specific for fibroblast activation protein (FAP), clone 4B9, were subcloned in frame with either the constant heavy chain of the knob or the constant light chain of human IgG1. The variable region of heavy and light chain DNA sequences encoding a non-binding clone, clone DP47, were subcloned in frame with either the constant heavy chain of the hole or the constant light chain of human IgG1. The crossmab technology was applied to reduce the formation of wrongly paired light chains (International patent application No. WO 2010/145792 A1). In this example a crossed Fab unit (VHCL) of the binder DP47 was fused to the knob chain.

[0842] The Pro329Gly, Leu234Ala and Leu235Ala mutations have been introduced in the constant region of the knob and hole heavy chains to abrogate binding to Fc gamma receptors (International Patent Appl. Publ. No. WO 2012/130831 A1).

[0843] Combination of the DP47 hulgG1 Fc hole chain containing the Y349C/T366S/L368A/Y407V mutations, the anti-FAP huIgG1 Fc knob chain containing the S354C/T366W mutations and the two light chains, anti-FAP and DP47, allows generation of a heterodimer, which includes an assembled trimeric 4-1BB ligand, one FAP binding Fab and one non binding DP47 Fab (FIGS. 5C and 5D).

[0844] Table 46 shows the cDNA and amino acid sequences of the monovalent DP47/FAP(4B9)-targeted 4-1BB ligand (71-254) trimer-containing Fc (kih) fusion antigen binding molecule, wherein the dimeric 4-1BBL is fused to Fc hole chain (Construct 2.17).

TABLE 46
Sequences of FAP(4B9)-targeted/DP47 human 4-1BB ligand trimer
containing Fc (kih) fusion antigen binding molecule
Construct 2.17

| SEQ ID | | |
|---|---|---|
| NO: | Description | Sequence |
| 219 | nucleotide | GAGGTGCAATTGTTGGAGTCTGGGGGAGGCTTGGTACA |
| | sequence of | GCCTGGGGGGTCCCTGAGACTCTCCTGTGCAGCCTCCGG |
| | DP47 (VH-CL) Fc | ATTCACCTTTAGCAGTTATGCCATGAGCTGGGTCCGCCA |
| | hole dimeric 4- | GGCTCCAGGGAAGGGGCTGGAGTGGGTCTCAGCTATTA |
| | 1BB ligand (71- | GTGGTAGTGGTGGTAGCACATACTACGCAGACTCCGTGA |
| | 254) chain | AGGGCCGGTTCACCATCTCCAGAGACAATTCCAAGAAC |
| | | ACGCTGTATCTGCAGATGAACAGCCTGAGAGCCGAGGA |
| | | CACGGCCGTATATTACTGTGCGAAAGGCAGCGGATTTGA |
| | | CTACTGGGGCCAAGGAACCCTGGTCACCGTCTCGAGCG |
| | | CTAGTGTGGCCGCTCCCTCCGTGTTTATCTTTCCCCCATC |
| | | CGATGAACAGCTGAAAAGCGGCACCGCCTCCGTCGTGT |
| | | GTCTGCTGAACAATTTTTACCCTAGGGAAGCTAAAGTGC |
| | | AGTGGAAAGTGGATAACGCACTGCAGTCCGGCAACTCC |
| | | CAGGAATCTGTGACAGAACAGGACTCCAAGGACAGCAC |
| | | CTACTCCCTGTCCTCCACCCTGACACTGTCTAAGGCTGA |
| | | TTATGAGAAACACAAAGTCTACGCCTGCGAAGTCACCC |
| | | ATCAGGGCCTGAGCTCGCCCGTCACAAAGAGCTTCAAC |
| | | AGGGGAGAGTGTGACAAAACTCACACATGCCCACCGTG |
| | | CCCAGCACCTGAAGCTGCAGGGGGACCGTCAGTCTTCCT |
| | | CTTCCCCCCAAAACCCAAGGACACCCTCATGATCTCCCG |
| | | GACCCCTGAGGTCACATGCGTGGTGGTGGACGTGAGCC |
| | | ACGAAGACCCTGAGGTCAAGTTCAACTGGTACGTGGAC |
| | | GGCGTGGAGGTGCATAATGCCAAGACAAAGCCGCGGGA |
| | | GGAGCAGTACAACAGCACGTACCGTGTGGTCAGCGTCC |
| | | TCACCGTCCTGCACCAGGACTGGCTGAATGGCAAGGAG |
| | | TACAAGTGCAAGGTCTCCAACAAAGCCCTCGGCGCCCC |
| | | CATCGAGAAAACCATCTCCAAAGCCAAAGGGCAGCCCC |
| | | GAGAACCACAGGTGTGCACCCTGCCCCCATCCCGGGAT |
| | | GAGCTGACCAAGAACCAGGTCAGCCTCTCGTGCGCAGT |
| | | CAAAGGCTTCTATCCCAGCGACATCGCCGTGGAGTGGG |
| | | AGAGCAATGGGCAGCCGGAGAACAACTACAAGACCACG |
| | | CCTCCCGTGCTGGACTCCGACGGCTCCTTCTTCCTCGTG |
| | | AGCAAGCTCACCGTGGACAAGAGCAGGTGGCAGCAGGG |
| | | GAACGTCTTCTCATGCTCCGTGATGCATGAGGCTCTGCA |
| | | CAACCACTACACGCAGAAGAGCCTCTCCCTGTCTCCGGG |
| | | TGGAGGCGGCGGAAGCGGAGGAGGAGGATCCAGAGAG |
| | | GGCCCTGAGCTGAGCCCCGATGATCCTGCTGGACTGCTG |
| | | GACCTGCGGCAGGGCATGTTTGCTCAGCTGGTGGCCCAG |
| | | AACGTGCTGCTGATCGATGGCCCCCTGTCCTGGTACAGC |
| | | GATCCTGGACTGGCTGGCGTGTCACTGACAGGCGGCCTG |
| | | AGCTACAAAGAGGACACCAAAGAACTGGTGGTGGCCAA |
| | | GGCCGGCGTGTACTACGTGTTCTTTCAGCTGGAACTGCG |
| | | GAGAGTGGTGGCCGGCGAAGGATCTGGCTCTGTGTCTCT |
| | | GGCCCTGCATCTGCAGCCTCTGAGAAGCGCTGCTGGCGC |
| | | TGCAGCTCTGGCACTGACAGTGGATCTGCCTCCTGCCAG |
| | | CTCCGAGGCCCGGAATAGCGCATTTGGGTTTCAAGGCAG |
| | | GCTGCTGCACCTGTCTGCCGGCCAGAGGCTGGGAGTGC |
| | | ATCTGCACACAGAGGCCAGGGCTAGACACGCCTGGCAG |
| | | CTGACACAGGGCGCTACAGTGCTGGGCCTGTTCAGAGTG |
| | | ACCCCCGAGATTCCAGCCGGCCTGCCTTCTCCAAGAAGC |
| | | GAAGGCGGAGGCGGATCTGGCGGCGGAGGATCTAGAGA |
| | | GGGACCCGAACTGTCCCCTGACGATCCAGCCGGGCTGCT |
| | | GGATCTGAGACAGGGAATGTTCGCCCAGCTGGTGGCTC |
| | | AGAATGTGCTGCTGATTGACGGACCTCTGAGCTGGTACT |
| | | CCGACCCAGGGCTGGCAGGGGTGTCCCTGACTGGGGGA |
| | | CTGTCCTACAAAGAAGATACAAAAGAACTGGTGGTGGC |
| | | TAAAGCTGGGGTGTACTATGTGTTTTTTCAGCTGGAACT |
| | | GAGGCGGGTGGTGGCTGGGGAGGGCTCAGGATCTGTGT |
| | | CCCTGGCTCTGCATCTGCAGCCACTGCGCTCTGCTGCTG |
| | | GCGCAGCTGCACTGGCTCTGACTGTGGACCTGCCACCAG |
| | | CCTCTAGCGAGGCCAGAAACAGCGCCTTCGGGTTCCAA |
| | | GGACGCCTGCTGCATCTGAGCGCCGGACAGCGCCTGGG |
| | | AGTGCATCTGCATACTGAAGCCAGAGCCCGGCATGCTTG |
| | | GCAGCTGACTCAGGGGGCAACTGTGCTGGGACTGTTTCG |
| | | CGTGACACCTGAGATCCCTGCCGGACTGCCAAGCCCTAG |
| | | ATCAGAA |
| 220 | nucleotide | GAGGTGCAGCTGCTCGAAAGCGGCGGAGGACTGGTGCA |
| | sequence of FAP | GCCTGGCGGCAGCCTGAGACTGTCTTGCGCCGCCAGCG |
| | (4B9) Fc knob | GCTTCACCTTCAGCAGCTACGCCATGAGCTGGGTCCGCC |
| | monomeric 4- | AGGCCCCTGGCAAGGGACTGGAATGGGTGTCCGCCATC |
| | 1BB (71-254) | ATCGGCTCTGGCGCCAGCACCTACTACGCCGACAGCGTG |
| | ligand | AAGGGCCGGTTCACCATCAGCCGGGACAACAGCAAGAA |
| | | CACCCTGTACCTGCAGATGAACAGCCTGCGGGCCGAGG |
| | | ACACCGCCGTGTACTACTGCGCCAAGGGATGGTTCGGC |
| | | GGCTTCAACTACTGGGGACAGGGCACCCTGGTCACAGT |
| | | GTCCAGCGCTAGCACCAAGGGCCCCTCCGTGTTCCCCCT |
| | | GGCCCCCAGCAGCAAGAGCACCAGCGGCGGCACAGCCG |
| | | CTCTGGGCTGCCTGGTCAAGGACTACTTCCCCGAGCCCG |
| | | TGACCGTGTCCTGGAACAGCGGAGCCCTGACCTCCGGC |
| | | GTGCACACCTTCCCCGCCGTGCTGCAGAGTTCTGGCCTG |
| | | TATAGCCTGAGCAGCGTGGTCACCGTGCCTTCTAGCAGC |
| | | CTGGGCACCCAGACCTACATCTGCAACGTGAACCACAA |
| | | GCCCAGCAACACCAAGGTGGACAAGAAGGTGGAGCCCA |
| | | AGAGCTGCGACAAGACCCACACCTGTCCCCCTTGTCCTG |
| | | CCCCTGAAGCTGCTGGCGGCCCTTCTGTGTTCCTGTTCCC |
| | | CCCAAAGCCCAAGGACACCCTGATGATCAGCCGGACCC |
| | | CCGAAGTGACCTGCGTGGTGGTGGATGTGTCCCACGAG |
| | | GACCCTGAAGTGAAGTTCAATTGGTACGTGGACGGCGT |
| | | GGAAGTGCACAACGCCAAGACAAAGCCGCGGGAGGAG |
| | | CAGTACAACAGCACGTACCGTGTGGTCAGCGTCCTCACC |
| | | GTCCTGCACCAGGACTGGCTGAATGGCAAGGAGTACAA |
| | | GTGCAAGGTCTCCAACAAAGCCCTCGGCGCCCCCATCG |
| | | AGAAAACCATCTCCAAAGCCAAAGGGCAGCCCCGAGAA |
| | | CCACAGGTGTACACCCTGCCCCCCTGCAGAGATGAGCTG |
| | | ACCAAGAACCAGGTGTCCCTGTGGTGTCTGGTCAAGGGC |
| | | TTCTACCCCAGCGATATCGCCGTGGAGTGGGAGAGCAA |
| | | CGGCCAGCCTGAGAACAACTACAAGACCACCCCCCCTG |
| | | TGCTGGACAGCGACGGCAGCTTCTTCCTGTACTCCAAAC |
| | | TGACCGTGGACAAGAGCCGGTGGCAGCAGGGCAACGTG |
| | | TTCAGCTGCAGCGTGATGCACGAGGCCCTGCACAACCA |
| | | CTACACCCAGAAGTCCCTGAGCCTGAGCCCCGGCGGAG |
| | | GCGGCGGAAGCGGAGGAGGAGGATCCAGAGAGGGCCC |
| | | TGAGCTGAGCCCCGATGATCCTGCTGGACTGCTGGACCT |
| | | GCGGCAGGGCATGTTTGCTCAGCTGGTGGCCCAGAACGT |
| | | GCTGCTGATCGATGGCCCCCTGTCCTGGTACAGCGATCC |
| | | TGGACTGGCTGGCGTGTCACTGACAGGCGGCCTGAGCTA |
| | | CAAAGAGGACACCAAAGAACTGGTGGTGGCCAAGGCCG |
| | | GCGTGTACTACGTGTTCTTTCAGCTGGAACTGCGGAGAG |
| | | TGGTGGCCGGCGAAGGATCTGGCTCTGTGTCTCTGGCCC |
| | | TGCATCTGCAGCCTCTGAGAAGCGCTGCTGGCGCTGCAG |
| | | CTCTGGCACTGACAGTGGATCTGCCTCCTGCCAGCTCCG |
| | | AGGCCCGGAATAGCGCATTTGGGTTTCAAGGCAGGCTG |
| | | CTGCACCTGTCTGCCGGCCAGAGGCTGGGAGTGCATCTG |
| | | CACACAGAGGCCAGGGCTAGACACGCCTGGCAGCTGAC |
| | | ACAGGGCGCTACAGTGCTGGGCCTGTTCAGAGTGACCC |
| | | CCGAGATTCCAGCCGGCCTGCCTTCTCCAAGAAGCGAA |
| 103 | nucleotide | see Table 1 |
| | sequence of anti- | |
| | FAP(4B9) light | |
| | chain | |
| 211 | nucleotide | see Table 42 |
| | sequence of DP47 | |
| | (VL-CH1) light | |
| | chain | |
| 221 | DP47(VH-CL) Fc | EVQLLESGGGLVQPGGSLRLSCAASGFTFSSYAMSWVRQA |
| | hole dimeric 4- | PGKGLEWVSAISGSGGSTYYADSVKGRFTISRDNSKNTLYL |
| | 1BB ligand (71- | QMNSLRAEDTAVYYCAKGSGFDYWGQGTLVTVSSASVA |
| | 254) chain | APSVFIFPPSDEQLKSGTASVVCLLNNFYPREAKVQWKVD |
| | | NALQSGNSQESVTEQDSKDSTYSLSSTLTLSKADYEKHKV |
| | | YACEVTHQGLSSPVTKSFNRGECDKTHTCPPCPAPEAAGG |
| | | PSVFLFPPKPKDTLMISRTPEVTCVVVDVSHEDPEVKFNWY |
| | | VDGVEVHNAKTKPREEQYNSTYRVVSVLTVLHQDWLNG |
| | | KEYKCKVSNKALGAPIEKTISKAKGQPREPQVCTLPPSRDE |
| | | LTKNQVSLSCAVKGFYPSDIAVEWESNGQPENNYKTTPPV |
| | | LDSDGSFFLVSKLTVDKSRWQQGNVFSCSVMHEALHNHY |
| | | TQKSLSLSPGGGGGSGGGGSREGPELSPDDPAGLLDLRQG |
| | | MFAQLVAQNVLLIDGPLSWYSDPGLAGVSLTGGLSYKEDT |
| | | KELVVAKAGVYYVFFQLELRRVVAGEGSGSVSLALHLQPL |
| | | RSAAGAAALALTVDLPPASSEARNSAFGFQGRLLHLSAGQ |
| | | RLGVHLHTEARARHAWQLTQGATVLGLFRVTPEIPAGLPS |
| | | PRSEGGGGSGGGGSREGPELSPDDPAGLLDLRQGMFAQLV |
| | | AQNVLLIDGPLSWYSDPGLAGVSLTGGLSYKEDTKELVVA |
| | | KAGVYYVFFQLELRRVVAGEGSGSVSLALHLQPLRSAAGA |
| | | AALALTVDLPPASSEARNSAFGFQGRLLHLSAGQRLGVHL |
| | | HTEARARHAWQLTQGATVLGLFRVTPEIPAGLPSPRSE |
| 222 | FAP (4B9) Fc | EVQLLESGGGLVQPGGSLRLSCAASGFTFSSYAMSWVRQA |
| | knob monomeric | PGKGLEWVSAIIGSGASTYYADSVKGRFTISRDNSKNTLYL |
| | 4-1BB (71-254) | QMNSLRAEDTAVYYCAKGWFGGFNYWGQGTLVTVSSAS |
| | ligand | TKGPSVFPLAPSSKSTSGGTAALGCLVKDYFPEPVTVSWNS |
| | | GALTSGVHTFPAVLQSSGLYSLSSVVTVPSSSLGTQTYICN |
| | | VNHKPSNTKVDKKVEPKSCDKTHTCPPCPAPEAAGGPSVF |
| | | LFPPKPKDTLMISRTPEVTCVVVDVSHEDPEVKFNWYVDG |
| | | VEVHNAKTKPREEQYNSTYRVVSVLTVLHQDWLNGKEYK |
| | | CKVSNKALGAPIEKTISKAKGQPREPQVYTLPPCRDELTKN |
| | | QVSLWCLVKGFYPSDIAVEWESNGQPENNYKTTPPVLDSD |
| | | GSFFLYSKLTVDKSRWQQGNVFSCSVMHEALHNHYTQKS |
| | | LSLSPGGGGGSGGGGSREGPELSPDDPAGLLDLRQGMFAQ |
| | | LVAQNVLLIDGPLSWYSDPGLAGVSLTGGLSYKEDTKELV |
| | | VAKAGVYYVFFQLELRRVVAGEGSGSVSLALHLQPLRSAA |
| | | GAAALALTVDLPPASSEARNSAFGFQGRLLHLSAGQRLGV |
| | | HLHTEARARHAWQLTQGATVLGLFRVTPEIPAGLPSPRSE |
| 106 | anti-FAP(4B9) | see Table 1 |
| | light chain | |
| 214 | DP47 (VL-CH1) | see Table 42 |
| | light chain | |

[0845] Table 47 shows the cDNA and amino acid sequences of the monovalent DP47/FAP(4B9)-targeted 4-1BB ligand (71-254) trimer-containing Fc (kih) fusion antigen binding molecule, wherein the dimeric 4-1BBL is fused to the knob chain (Construct 2.18).

TABLE 47
Sequences of FAP(4B9)-targeted human 4-1BB ligand trimer
containing Fc (kih) fusion molecule Construct 2.18

| SEQ ID | | |
|---|---|---|
| NO: | Description | Sequence |
| 223 | nucleotide | GAGGTGCAATTGTTGGAGTCTGGGGGAGGCTTGGTACA |
| | sequence of DP47 | GCCTGGGGGGTCCCTGAGACTCTCCTGTGCAGCCTCCGG |
| | (VH-CL) Fc hole | ATTCACCTTTAGCAGTTATGCCATGAGCTGGGTCCGCCA |
| | monomeric 4- | GGCTCCAGGGAAGGGGCTGGAGTGGGTCTCAGCTATTA |
| | 1BBL (71-254) | GTGGTAGTGGTGGTAGCACATACTACGCAGACTCCGTGA |
| | chain | AGGGCCGGTTCACCATCTCCAGAGACAATTCCAAGAAC |
| | | ACGCTGTATCTGCAGATGAACAGCCTGAGAGCCGAGGA |
| | | CACGGCCGTATATTACTGTGCGAAAGGCAGCGGATTTGA |
| | | CTACTGGGGCCAAGGAACCCTGGTCACCGTCTCGAGCG |
| | | CTAGTGTGGCCGCTCCCTCCGTGTTTATCTTTCCCCCATC |
| | | CGATGAACAGCTGAAAAGCGGCACCGCCTCCGTCGTGT |
| | | GTCTGCTGAACAATTTTTACCCTAGGGAAGCTAAAGTGC |
| | | AGTGGAAAGTGGATAACGCACTGCAGTCCGGCAACTCC |
| | | CAGGAATCTGTGACAGAACAGGACTCCAAGGACAGCAC |
| | | CTACTCCCTGTCCTCCACCCTGACACTGTCTAAGGCTGA |
| | | TTATGAGAAACACAAAGTCTACGCCTGCGAAGTCACCC |
| | | ATCAGGGCCTGAGCTCGCCCGTCACAAAGAGCTTCAAC |
| | | AGGGGAGAGTGTGACAAAACTCACACATGCCCACCGTG |
| | | CCCAGCACCTGAAGCTGCAGGGGGACCGTCAGTCTTCCT |
| | | CTTCCCCCCAAAACCCAAGGACACCCTCATGATCTCCCG |
| | | GACCCCTGAGGTCACATGCGTGGTGGTGGACGTGAGCC |
| | | ACGAAGACCCTGAGGTCAAGTTCAACTGGTACGTGGAC |
| | | GGCGTGGAGGTGCATAATGCCAAGACAAAGCCGCGGGA |
| | | GGAGCAGTACAACAGCACGTACCGTGTGGTCAGCGTCC |
| | | TCACCGTCCTGCACCAGGACTGGCTGAATGGCAAGGAG |
| | | TACAAGTGCAAGGTCTCCAACAAAGCCCTCGGCGCCCC |
| | | CATCGAGAAAACCATCTCCAAAGCCAAAGGGCAGCCCC |
| | | GAGAACCACAGGTGTGCACCCTGCCCCCATCCCGGGAT |
| | | GAGCTGACCAAGAACCAGGTCAGCCTCTCGTGCGCAGT |
| | | CAAAGGCTTCTATCCCAGCGACATCGCCGTGGAGTGGG |
| | | AGAGCAATGGGCAGCCGGAGAACAACTACAAGACCACG |
| | | CCTCCCGTGCTGGACTCCGACGGCTCCTTCTTCCTCGTG |
| | | AGCAAGCTCACCGTGGACAAGAGCAGGTGGCAGCAGGG |
| | | GAACGTCTTCTCATGCTCCGTGATGCATGAGGCTCTGCA |
| | | CAACCACTACACGCAGAAGAGCCTCTCCCTGTCTCCGGG |
| | | TGGAGGCGGCGGAAGCGGAGGAGGAGGATCCAGAGAG |
| | | GGCCCTGAGCTGAGCCCCGATGATCCTGCTGGACTGCTG |
| | | GACCTGCGGCAGGGCATGTTTGCTCAGCTGGTGGCCCAG |
| | | AACGTGCTGCTGATCGATGGCCCCCTGTCCTGGTACAGC |
| | | GATCCTGGACTGGCTGGCGTGTCACTGACAGGCGGCCTG |
| | | AGCTACAAAGAGGACACCAAAGAACTGGTGGTGGCCAA |
| | | GGCCGGCGTGTACTACGTGTTCTTTCAGCTGGAACTGCG |
| | | GAGAGTGGTGGCCGGCGAAGGATCTGGCTCTGTGTCTCT |
| | | GGCCCTGCATCTGCAGCCTCTGAGAAGCGCTGCTGGCGC |
| | | TGCAGCTCTGGCACTGACAGTGGATCTGCCTCCTGCCAG |
| | | CTCCGAGGCCCGGAATAGCGCATTTGGGTTTCAAGGCAG |
| | | GCTGCTGCACCTGTCTGCCGGCCAGAGGCTGGGAGTGC |
| | | ATCTGCACACAGAGGCCAGGGCTAGACACGCCTGGCAG |
| | | CTGACACAGGGCGCTACAGTGCTGGGCCTGTTCAGAGTG |
| | | ACCCCCGAGATTCCAGCCGGCCTGCCTTCTCCAAGAAGC |
| | | GAA |
| 224 | nucleotide | GAGGTGCAGCTGCTCGAAAGCGGCGGAGGACTGGTGCA |
| | sequence of FAP | GCCTGGCGGCAGCCTGAGACTGTCTTGCGCCGCCAGCG |
| | (4B9) Fc knob | GCTTCACCTTCAGCAGCTACGCCATGAGCTGGGTCCGCC |
| | dimeric 4-1BB | AGGCCCCTGGCAAGGGACTGGAATGGGTGTCCGCCATC |
| | ligand (71-254) | ATCGGCTCTGGCGCCAGCACCTACTACGCCGACAGCGTG |
| | chain | AAGGGCCGGTTCACCATCAGCCGGGACAACAGCAAGAA |
| | | CACCCTGTACCTGCAGATGAACAGCCTGCGGGCCGAGG |
| | | ACACCGCCGTGTACTACTGCGCCAAGGGATGGTTCGGC |
| | | GGCTTCAACTACTGGGGACAGGGCACCCTGGTCACAGT |
| | | GTCCAGCGCTAGCACCAAGGGCCCCTCCGTGTTCCCCCT |
| | | GGCCCCCAGCAGCAAGAGCACCAGCGGCGGCACAGCCG |
| | | CTCTGGGCTGCCTGGTCAAGGACTACTTCCCCGAGCCCG |
| | | TGACCGTGTCCTGGAACAGCGGAGCCCTGACCTCCGGC |
| | | GTGCACACCTTCCCCGCCGTGCTGCAGAGTTCTGGCCTG |
| | | TATAGCCTGAGCAGCGTGGTCACCGTGCCTTCTAGCAGC |
| | | CTGGGCACCCAGACCTACATCTGCAACGTGAACCACAA |
| | | GCCCAGCAACACCAAGGTGGACAAGAAGGTGGAGCCCA |
| | | AGAGCTGCGACAAGACCCACACCTGTCCCCCTTGTCCTG |
| | | CCCCTGAAGCTGCTGGCGGCCCTTCTGTGTTCCTGTTCCC |
| | | CCCAAAGCCCAAGGACACCCTGATGATCAGCCGGACCC |
| | | CCGAAGTGACCTGCGTGGTGGTGGATGTGTCCCACGAG |
| | | GACCCTGAAGTGAAGTTCAATTGGTACGTGGACGGCGT |
| | | GGAAGTGCACAACGCCAAGACAAAGCCGCGGGAGGAG |
| | | CAGTACAACAGCACGTACCGTGTGGTCAGCGTCCTCACC |
| | | GTCCTGCACCAGGACTGGCTGAATGGCAAGGAGTACAA |
| | | GTGCAAGGTCTCCAACAAAGCCCTCGGCGCCCCCATCG |
| | | AGAAAACCATCTCCAAAGCCAAAGGGCAGCCCCGAGAA |
| | | CCACAGGTGTACACCCTGCCCCCCTGCAGAGATGAGCTG |
| | | ACCAAGAACCAGGTGTCCCTGTGGTGTCTGGTCAAGGGC |
| | | TTCTACCCCAGCGATATCGCCGTGGAGTGGGAGAGCAA |
| | | CGGCCAGCCTGAGAACAACTACAAGACCACCCCCCCTG |
| | | TGCTGGACAGCGACGGCAGCTTCTTCCTGTACTCCAAAC |
| | | TGACCGTGGACAAGAGCCGGTGGCAGCAGGGCAACGTG |
| | | TTCAGCTGCAGCGTGATGCACGAGGCCCTGCACAACCA |
| | | CTACACCCAGAAGTCCCTGAGCCTGAGCCCCGGCGGAG |
| | | GCGGCGGAAGCGGAGGAGGAGGATCCAGAGAGGGCCC |
| | | TGAGCTGAGCCCCGATGATCCTGCTGGACTGCTGGACCT |
| | | GCGGCAGGGCATGTTTGCTCAGCTGGTGGCCCAGAACGT |
| | | GCTGCTGATCGATGGCCCCCTGTCCTGGTACAGCGATCC |
| | | TGGACTGGCTGGCGTGTCACTGACAGGCGGCCTGAGCTA |
| | | CAAAGAGGACACCAAAGAACTGGTGGTGGCCAAGGCCG |
| | | GCGTGTACTACGTGTTCTTTCAGCTGGAACTGCGGAGAG |
| | | TGGTGGCCGGCGAAGGATCTGGCTCTGTGTCTCTGGCCC |
| | | TGCATCTGCAGCCTCTGAGAAGCGCTGCTGGCGCTGCAG |
| | | CTCTGGCACTGACAGTGGATCTGCCTCCTGCCAGCTCCG |
| | | AGGCCCGGAATAGCGCATTTGGGTTTCAAGGCAGGCTG |
| | | CTGCACCTGTCTGCCGGCCAGAGGCTGGGAGTGCATCTG |
| | | CACACAGAGGCCAGGGCTAGACACGCCTGGCAGCTGAC |
| | | ACAGGGCGCTACAGTGCTGGGCCTGTTCAGAGTGACCC |
| | | CCGAGATTCCAGCCGGCCTGCCTTCTCCAAGAAGCGAA |
| | | GGCGGAGGCGGATCTGGCGGCGGAGGATCTAGAGAGGG |
| | | ACCCGAACTGTCCCCTGACGATCCAGCCGGGCTGCTGGA |
| | | TCTGAGACAGGGAATGTTCGCCCAGCTGGTGGCTCAGA |
| | | ATGTGCTGCTGATTGACGGACCTCTGAGCTGGTACTCCG |
| | | ACCCAGGGCTGGCAGGGGTGTCCCTGACTGGGGGACTG |
| | | TCCTACAAAGAAGATACAAAAGAACTGGTGGTGGCTAA |
| | | AGCTGGGGTGTACTATGTGTTTTTTCAGCTGGAACTGAG |
| | | GCGGGTGGTGGCTGGGGAGGGCTCAGGATCTGTGTCCCT |
| | | GGCTCTGCATCTGCAGCCACTGCGCTCTGCTGCTGGCGC |
| | | AGCTGCACTGGCTCTGACTGTGGACCTGCCACCAGCCTC |
| | | TAGCGAGGCCAGAAACAGCGCCTTCGGGTTCCAAGGAC |
| | | GCCTGCTGCATCTGAGCGCCGGACAGCGCCTGGGAGTG |
| | | CATCTGCATACTGAAGCCAGAGCCCGGCATGCTTGGCA |
| | | GCTGACTCAGGGGGCAACTGTGCTGGGACTGTTTCGCGT |
| | | GACACCTGAGATCCCTGCCGGACTGCCAAGCCCTAGATC |
| | | AGAA |
| 103 | nucleotide | See Table 1 |
| | sequence of anti- | |
| | FAP(4B9) light | |
| | chain | |
| 211 | nucleotide | see Table 42 |
| | sequence of DP47 | |
| | (VL-CH1) light | |
| | chain | |
| 225 | DP47 (VH-CL) | EVQLLESGGGLVQPGGSLRLSCAASGFTFSSYAMSWVRQA |
| | Fc hole | PGKGLEWVSAISGSGGSTYYADSVKGRFTISRDNSKNTLYL |
| | monomeric 4- | QMNSLRAEDTAVYYCAKGSGFDYWGQGTLVTVSSASVA |
| | 1BBL (71-254) | APSVFIFPPSDEQLKSGTASVVCLLNNFYPREAKVQWKVD |
| | chain | NALQSGNSQESVTEQDSKDSTYSLSSTLTLSKADYEKHKV |
| | | YACEVTHQGLSSPVTKSFNRGECDKTHTCPPCPAPEAAGG |
| | | PSVFLFPPKPKDTLMISRTPEVTCVVVDVSHEDPEVKFNWY |
| | | VDGVEVHNAKTKPREEQYNSTYRVVSVLTVLHQDWLNG |
| | | KEYKCKVSNKALGAPIEKTISKAKGQPREPQVCTLPPSRDE |
| | | LTKNQVSLSCAVKGFYPSDIAVEWESNGQPENNYKTTPPV |
| | | LDSDGSFFLVSKLTVDKSRWQQGNVFSCSVMHEALHNHY |
| | | TQKSLSLSPGGGGGSGGGGSREGPELSPDDPAGLLDLRQG |
| | | MFAQLVAQNVLLIDGPLSWYSDPGLAGVSLTGGLSYKEDT |
| | | KELVVAKAGVYYVFFQLELRRVVAGEGSGSVSLALHLQPL |
| | | RSAAGAAALALTVDLPPASSEARNSAFGFQGRLLHLSAGQ |
| | | RLGVHLHTEARARHAWQLTQGATVLGLFRVTPEIPAGLPS |
| | | PRSE |
| 226 | anti-FAP(4B9) Fc | EVQLLESGGGLVQPGGSLRLSCAASGFTFSSYAMSWVRQA |
| | knob dimeric 4- | PGKGLEWVSAIIGSGASTYYADSVKGRFTISRDNSKNTLYL |
| | 1BB ligand (71- | QMNSLRAEDTAVYYCAKGWFGGFNYWGQGTLVTVSSAS |
| | 254) chain | TKGPSVFPLAPSSKSTSGGTAALGCLVKDYFPEPVTVSWNS |
| | | GALTSGVHTFPAVLQSSGLYSLSSVVTVPSSSLGTQTYICN |
| | | VNHKPSNTKVDKKVEPKSCDKTHTCPPCPAPEAAGGPSVF |
| | | LFPPKPKDTLMISRTPEVTCVVVDVSHEDPEVKFNWYVDG |
| | | VEVHNAKTKPREEQYNSTYRVVSVLTVLHQDWLNGKEYK |
| | | CKVSNKALGAPIEKTISKAKGQPREPQVYTLPPCRDELTKN |
| | | QVSLWCLVKGFYPSDIAVEWESNGQPENNYKTTPPVLDSD |
| | | GSFFLYSKLTVDKSRWQQGNVFSCSVMHEALHNHYTQKS |
| | | LSLSPGGGGGSGGGGSREGPELSPDDPAGLLDLRQGMFAQ |
| | | LVAQNVLLIDGPLSWYSDPGLAGVSLTGGLSYKEDTKELV |
| | | VAKAGVYYVFFQLELRRVVAGEGSGSVSLALHLQPLRSAA |
| | | GAAALALTVDLPPASSEARNSAFGFQGRLLHLSAGQRLGV |
| | | HLHTEARARHAWQLTQGATVLGLFRVTPEIPAGLPSPRSEG |
| | | GGGSGGGGSREGPELSPDDPAGLLDLRQGMFAQLVAQNV |
| | | LLIDGPLSWYSDPGLAGVSLTGGLSYKEDTKELVVAKAGV |
| | | YYVFFQLELRRVVAGEGSGSVSLALHLQPLRSAAGAAALA |
| | | LTVDLPPASSEARNSAFGFQGRLLHLSAGQRLGVHLHTEA |
| | | RARHAWQLTQGATVLGLFRVTPEIPAGLPSPRSE |
| 106 | anti-FAP(4B9) | See Table 1 |
| | light chain | |
| 214 | DP47 (VL-CH1) | see Table 42 |
| | light chain | |

[0846] 4.3 Preparation of Monovalent FAP(4B9)-Targeted/DP47 4-1BB Ligand Trimer-Containing Fc (kih) Fusion Antigen Binding Molecule, wherein the 4-1BB Ligands are C-Terminally Fused (Constructs 2.19 and 2.20) (FAP on the Hole Chain)

[0847] The DNA sequence encoding part of the ectodomain (amino acids 71-248) of human 4-1BB ligand was synthetized according to the P41273 sequence of Uniprot database. Constructs 2.19 and 2.20 were prepared as described in Example 4.1 for Constructs 2.15 and 2.16.

[0848] Table 48 shows the cDNA and amino acid sequences of the monovalent FAP(4B9)-targeted/DP47 4-1BB ligand (71-248) trimer-containing Fc (kih) fusion antigen binding molecule, wherein the dimeric 4-1BBL is fused to the hole chain (Construct 2.19).

TABLE 48
Sequences of FAP(4B9)-targeted/DP47 human 4-1BB ligand trimer
containing Fc (kih) fusion antigen binding molecule
Construct 2.19

| SEQ ID | | |
|---|---|---|
| NO: | Description | Sequence |
| 171 | nucleotide | see Table 23 |
| | sequence of anti- | |
| | FAP(4B9) Fc | |
| | hole dimeric 4- | |
| | 1BB ligand (71- | |
| | 248) chain | |
| 227 | nucleotide | GAGGTGCAATTGTTGGAGTCTGGGGGAGGCTTGGTACA |
| | sequence of DP47 | GCCTGGGGGGTCCCTGAGACTCTCCTGTGCAGCCTCCGG |
| | (VHCL) Fc knob | ATTCACCTTTAGCAGTTATGCCATGAGCTGGGTCCGCCA |
| | monomeric 4- | GGCTCCAGGGAAGGGGCTGGAGTGGGTCTCAGCTATTA |
| | 1BB (71-248) | GTGGTAGTGGTGGTAGCACATACTACGCAGACTCCGTGA |
| | ligand | AGGGCCGGTTCACCATCTCCAGAGACAATTCCAAGAAC |
| | | ACGCTGTATCTGCAGATGAACAGCCTGAGAGCCGAGGA |
| | | CACGGCCGTATATTACTGTGCGAAAGGCAGCGGATTTGA |
| | | CTACTGGGGCCAAGGAACCCTGGTCACCGTCTCGAGCG |
| | | CTAGTGTGGCCGCTCCCTCCGTGTTTATCTTTCCCCCATC |
| | | CGATGAACAGCTGAAAAGCGGCACCGCCTCCGTCGTGT |
| | | GTCTGCTGAACAATTTTTACCCTAGGGAAGCTAAAGTGC |
| | | AGTGGAAAGTGGATAACGCACTGCAGTCCGGCAACTCC |
| | | CAGGAATCTGTGACAGAACAGGACTCCAAGGACAGCAC |
| | | CTACTCCCTGTCCTCCACCCTGACACTGTCTAAGGCTGA |
| | | TTATGAGAAACACAAAGTCTACGCCTGCGAAGTCACCC |
| | | ATCAGGGCCTGAGCTCGCCCGTCACAAAGAGCTTCAAC |
| | | AGGGGAGAGTGTGACAAGACCCACACCTGTCCCCCTTG |
| | | TCCTGCCCCTGAAGCTGCTGGCGGCCCTTCTGTGTTCCT |
| | | GTTCCCCCCAAAGCCCAAGGACACCCTGATGATCAGCC |
| | | GGACCCCCGAAGTGACCTGCGTGGTGGTGGATGTGTCCC |
| | | ACGAGGACCCTGAAGTGAAGTTCAATTGGTACGTGGAC |
| | | GGCGTGGAAGTGCACAACGCCAAGACAAAGCCGCGGGA |
| | | GGAGCAGTACAACAGCACGTACCGTGTGGTCAGCGTCC |
| | | TCACCGTCCTGCACCAGGACTGGCTGAATGGCAAGGAG |
| | | TACAAGTGCAAGGTCTCCAACAAAGCCCTCGGCGCCCC |
| | | CATCGAGAAAACCATCTCCAAAGCCAAAGGGCAGCCCC |
| | | GAGAACCACAGGTGTACACCCTGCCCCCCTGCAGAGAT |
| | | GAGCTGACCAAGAACCAGGTGTCCCTGTGGTGTCTGGTC |
| | | AAGGGCTTCTACCCCAGCGATATCGCCGTGGAGTGGGA |
| | | GAGCAACGGCCAGCCTGAGAACAACTACAAGACCACCC |
| | | CCCCTGTGCTGGACAGCGACGGCAGCTTCTTCCTGTACT |
| | | CCAAACTGACCGTGGACAAGAGCCGGTGGCAGCAGGGC |
| | | AACGTGTTCAGCTGCAGCGTGATGCACGAGGCCCTGCA |
| | | CAACCACTACACCCAGAAGTCCCTGAGCCTGAGCCCCG |
| | | GCGGAGGCGGCGGAAGCGGAGGAGGAGGATCCAGAGA |
| | | GGGCCCTGAGCTGAGCCCTGATGATCCTGCCGGACTGCT |
| | | GGACCTGCGGCAGGGAATGTTTGCCCAGCTGGTGGCCC |
| | | AGAACGTGCTGCTGATCGATGGCCCCCTGTCCTGGTACA |
| | | GCGATCCTGGACTGGCTGGCGTGTCACTGACAGGCGGC |
| | | CTGAGCTACAAAGAGGACACCAAAGAACTGGTGGTGGC |
| | | CAAGGCCGGCGTGTACTACGTGTTCTTTCAGCTGGAACT |
| | | GCGGAGAGTGGTGGCCGGCGAAGGATCTGGCTCTGTGT |
| | | CTCTGGCCCTGCATCTGCAGCCTCTGAGATCTGCTGCTG |
| | | GCGCCGCTGCTCTGGCACTGACAGTGGATCTGCCTCCTG |
| | | CCAGCAGCGAGGCCCGGAATAGCGCATTTGGGTTTCAA |
| | | GGCAGGCTGCTGCACCTGTCTGCCGGCCAGAGGCTGGG |
| | | AGTGCATCTGCACACAGAGGCCAGGGCTAGACACGCCT |
| | | GGCAGCTGACACAGGGCGCTACAGTGCTGGGCCTGTTC |
| | | AGAGTGACCCCCGAGATTCCTGCCGGGCTC |
| 103 | nucleotide | see Table 1 |
| | sequence of anti- | |
| | FAP(4B9) light | |
| | chain | |
| 211 | nucleotide | see Table 42 |
| | sequence of DP47 | |
| | (VL-CH1) light | |
| | chain | |
| 173 | anti-FAP(4B9) Fc | see Table 23 |
| | hole dimeric 4- | |
| | 1BB ligand (71- | |
| | 248) chain | |
| 228 | DP47 (VH-CL) | EVQLLESGGGLVQPGGSLRLSCAASGFTFSSYAMSWVRQA |
| | Fc knob | PGKGLEWVSAISGSGGSTYYADSVKGRFTISRDNSKNTLYL |
| | monomeric 4- | QMNSLRAEDTAVYYCAKGSGFDYWGQGTLVTVSSASVA |
| | 1BB (71-248) | APSVFIFPPSDEQLKSGTASVVCLLNNFYPREAKVQWKVD |
| | ligand | NALQSGNSQESVTEQDSKDSTYSLSSTLTLSKADYEKHKV |
| | | YACEVTHQGLSSPVTKSFNRGECDKTHTCPPCPAPEAAGG |
| | | PSVFLFPPKPKDTLMISRTPEVTCVVVDVSHEDPEVKFNWY |
| | | VDGVEVHNAKTKPREEQYNSTYRVVSVLTVLHQDWLNG |
| | | KEYKCKVSNKALGAPIEKTISKAKGQPREPQVYTLPPCRDE |
| | | LTKNQVSLWCLVKGFYPSDIAVEWESNGQPENNYKTTPPV |
| | | LDSDGSFFLYSKLTVDKSRWQQGNVFSCSVMHEALHNHY |
| | | TQKSLSLSPGGGGGSGGGGSREGPELSPDDPAGLLDLRQG |
| | | MFAQLVAQNVLLIDGPLSWYSDPGLAGVSLTGGLSYKEDT |
| | | KELVVAKAGVYYVFFQLELRRVVAGEGSGSVSLALHLQPL |
| | | RSAAGAAALALTVDLPPASSEARNSAFGFQGRLLHLSAGQ |
| | | RLGVHLHTEARARHAWQLTQGATVLGLFRVTPEIPAGL |
| 106 | anti-FAP(4B9) | see Table 1 |
| | light chain | |
| 214 | DP47 (VL-CH1) | see Table 42 |
| | light chain | |

[0849] Table 49 shows the cDNA and amino acid sequences of the monovalent FAP(4B9)-targeted/DP47 4-1BB ligand (71-248) trimer-containing Fc (kih) fusion antigen binding molecule, wherein the dimeric 4-1BBL is fused to the Fc knob chain (Construct 2.20).

TABLE 49
Sequences of FAP(4B9)-targeted human 4-1BB ligand trimer
containing Fc (kih) fusion molecule Construct 2.20

| SEQ ID | | |
|---|---|---|
| NO: | Description | Sequence |
| 175 | nucleotide | see Table 24 |
| | sequence of anti- | |
| | FAP(4B9) Fc | |
| | hole monomeric | |
| | 4-1BBL (71-248) | |
| | chain | |
| 229 | nucleotide | GAGGTGCAATTGTTGGAGTCTGGGGGAGGCTTGGTACA |
| | sequence of DP47 | GCCTGGGGGGTCCCTGAGACTCTCCTGTGCAGCCTCCGG |
| | (VH-CL) Fc knob | ATTCACCTTTAGCAGTTATGCCATGAGCTGGGTCCGCCA |
| | dimeric 4-1BB | GGCTCCAGGGAAGGGGCTGGAGTGGGTCTCAGCTATTA |
| | ligand (71-248) | GTGGTAGTGGTGGTAGCACATACTACGCAGACTCCGTGA |
| | chain | AGGGCCGGTTCACCATCTCCAGAGACAATTCCAAGAAC |
| | | ACGCTGTATCTGCAGATGAACAGCCTGAGAGCCGAGGA |
| | | CACGGCCGTATATTACTGTGCGAAAGGCAGCGGATTTGA |
| | | CTACTGGGGCCAAGGAACCCTGGTCACCGTCTCGAGCG |
| | | CTAGTGTGGCCGCTCCCTCCGTGTTTATCTTTCCCCCATC |
| | | CGATGAACAGCTGAAAAGCGGCACCGCCTCCGTCGTGT |
| | | GTCTGCTGAACAATTTTTACCCTAGGGAAGCTAAAGTGC |
| | | AGTGGAAAGTGGATAACGCACTGCAGTCCGGCAACTCC |
| | | CAGGAATCTGTGACAGAACAGGACTCCAAGGACAGCAC |
| | | CTACTCCCTGTCCTCCACCCTGACACTGTCTAAGGCTGA |
| | | TTATGAGAAACACAAAGTCTACGCCTGCGAAGTCACCC |
| | | ATCAGGGCCTGAGCTCGCCCGTCACAAAGAGCTTCAAC |
| | | AGGGGAGAGTGTGACAAGACCCACACCTGTCCCCCTTG |
| | | TCCTGCCCCTGAAGCTGCTGGCGGCCCTTCTGTGTTCCT |
| | | GTTCCCCCCAAAGCCCAAGGACACCCTGATGATCAGCC |
| | | GGACCCCCGAAGTGACCTGCGTGGTGGTGGATGTGTCCC |
| | | ACGAGGACCCTGAAGTGAAGTTCAATTGGTACGTGGAC |
| | | GGCGTGGAAGTGCACAACGCCAAGACAAAGCCGCGGGA |
| | | GGAGCAGTACAACAGCACGTACCGTGTGGTCAGCGTCC |
| | | TCACCGTCCTGCACCAGGACTGGCTGAATGGCAAGGAG |
| | | TACAAGTGCAAGGTCTCCAACAAAGCCCTCGGCGCCCC |
| | | CATCGAGAAAACCATCTCCAAAGCCAAAGGGCAGCCCC |
| | | GAGAACCACAGGTGTACACCCTGCCCCCCTGCAGAGAT |
| | | GAGCTGACCAAGAACCAGGTGTCCCTGTGGTGTCTGGTC |
| | | AAGGGCTTCTACCCCAGCGATATCGCCGTGGAGTGGGA |
| | | GAGCAACGGCCAGCCTGAGAACAACTACAAGACCACCC |
| | | CCCCTGTGCTGGACAGCGACGGCAGCTTCTTCCTGTACT |
| | | CCAAACTGACCGTGGACAAGAGCCGGTGGCAGCAGGGC |
| | | AACGTGTTCAGCTGCAGCGTGATGCACGAGGCCCTGCA |
| | | CAACCACTACACCCAGAAGTCCCTGAGCCTGAGCCCCG |
| | | GCGGAGGCGGCGGAAGCGGAGGAGGAGGATCCAGAGA |
| | | GGGCCCTGAGCTGAGCCCTGATGATCCTGCCGGACTGCT |
| | | GGACCTGCGGCAGGGAATGTTTGCCCAGCTGGTGGCCC |
| | | AGAACGTGCTGCTGATCGATGGCCCCCTGTCCTGGTACA |
| | | GCGATCCTGGACTGGCTGGCGTGTCACTGACAGGCGGC |
| | | CTGAGCTACAAAGAGGACACCAAAGAACTGGTGGTGGC |
| | | CAAGGCCGGCGTGTACTACGTGTTCTTTCAGCTGGAACT |
| | | GCGGAGAGTGGTGGCCGGCGAAGGATCTGGCTCTGTGT |
| | | CTCTGGCCCTGCATCTGCAGCCTCTGAGATCTGCTGCTG |
| | | GCGCCGCTGCTCTGGCACTGACAGTGGATCTGCCTCCTG |
| | | CCAGCAGCGAGGCCCGGAATAGCGCATTTGGGTTTCAA |
| | | GGCAGGCTGCTGCACCTGTCTGCCGGCCAGAGGCTGGG |
| | | AGTGCATCTGCACACAGAGGCCAGGGCTAGACACGCCT |
| | | GGCAGCTGACACAGGGCGCTACAGTGCTGGGCCTGTTC |
| | | AGAGTGACCCCCGAGATTCCAGCAGGCCTGGGAGGCGG |
| | | CGGATCTGGCGGCGGAGGATCTAGAGAAGGACCCGAGC |
| | | TGTCCCCCGACGATCCCGCTGGGCTGCTGGATCTGAGAC |
| | | AGGGCATGTTCGCTCAGCTGGTGGCTCAGAATGTGCTGC |
| | | TGATTGACGGACCTCTGAGCTGGTACTCCGACCCAGGGC |
| | | TGGCAGGGGTGTCCCTGACTGGGGGACTGTCCTACAAA |
| | | GAAGATACAAAAGAACTGGTGGTGGCTAAAGCTGGGGT |
| | | GTACTATGTGTTTTTTCAGCTGGAACTGAGGCGGGTGGT |
| | | GGCTGGGGAGGGCTCAGGATCTGTGTCCCTGGCTCTGCA |
| | | TCTGCAGCCACTGCGCTCTGCAGCAGGGGCTGCAGCACT |
| | | GGCCCTGACTGTGGACCTGCCCCCAGCTTCTTCCGAGGC |
| | | CAGAAACAGCGCCTTCGGGTTCCAAGGACGCCTGCTGC |
| | | ATCTGAGCGCCGGACAGCGCCTGGGAGTGCATCTGCAT |
| | | ACTGAAGCCAGAGCCCGGCATGCTTGGCAGCTGACTCA |
| | | GGGGGCAACTGTGCTGGGACTGTTTCGCGTGACACCTGA |
| | | GATCCCAGCCGGGCTC |
| 103 | nucleotide | See Table 1 |
| | sequence of anti- | |
| | FAP(4B9) light | |
| | chain | |
| 211 | nucleotide | see Table 42 |
| | sequence of DP47 | |
| | (VL-CH1) light | |
| | chain | |
| 177 | anti-FAP(4B9) Fc | see Table 24 |
| | hole monomeric | |
| | 4-1BBL (71-248) | |
| | chain | |
| 230 | DP47 (VH-CL) | EVQLLESGGGLVQPGGSLRLSCAASGFTFSSYAMSWVRQA |
| | Fc knob dimeric | PGKGLEWVSAISGSGGSTYYADSVKGRFTISRDNSKNTLYL |
| | 4-1BB ligand (71- | QMNSLRAEDTAVYYCAKGSGFDYWGQGTLVTVSSASVA |
| | 248) chain | APSVFIFPPSDEQLKSGTASVVCLLNNFYPREAKVQWKVD |
| | | NALQSGNSQESVTEQDSKDSTYSLSSTLTLSKADYEKHKV |
| | | YACEVTHQGLSSPVTKSFNRGECDKTHTCPPCPAPEAAGG |
| | | PSVFLFPPKPKDTLMISRTPEVTCVVVDVSHEDPEVKFNWY |
| | | VDGVEVHNAKTKPREEQYNSTYRVVSVLTVLHQDWLNG |
| | | KEYKCKVSNKALGAPIEKTISKAKGQPREPQVYTLPPCRDE |
| | | LTKNQVSLWCLVKGFYPSDIAVEWESNGQPENNYKTTPPV |
| | | LDSDGSFFLYSKLTVDKSRWQQGNVFSCSVMHEALHNHY |
| | | TQKSLSLSPGGGGGSGGGGSREGPELSPDDPAGLLDLRQG |
| | | MFAQLVAQNVLLIDGPLSWYSDPGLAGVSLTGGLSYKEDT |
| | | KELVVAKAGVYYVFFQLELRRVVAGEGSGSVSLALHLQPL |
| | | RSAAGAAALALTVDLPPASSEARNSAFGFQGRLLHLSAGQ |
| | | RLGVHLHTEARARHAWQLTQGATVLGLFRVTPEIPAGLGG |
| | | GGSGGGGSREGPELSPDDPAGLLDLRQGMFAQLVAQNVL |
| | | LIDGPLSWYSDPGLAGVSLTGGLSYKEDTKELVVAKAGVY |
| | | YVFFQLELRRVVAGEGSGSVSLALHLQPLRSAAGAAALAL |
| | | TVDLPPASSEARNSAFGFQGRLLHLSAGQRLGVHLHTEAR |
| | | ARHAWQLTQGATVLGLFRVTPEIPAGL |
| 106 | anti-FAP(4B9) | See Table 1 |
| | light chain | |
| 214 | DP47 (VL-CH1) | see Table 42 |
| | light chain | |

[0850] 4.4 Preparation of Monovalent DP47/FAP(4B9)-Targeted 4-1BB Ligand Trimer-Containing Fc (kih) Fusion Antigen Binding Molecules, wherein the 4-1BB Ligands are C-Terminally Fused (Constructs 2.21 and 2.22) (FAP on the Knob Chain)

[0851] The DNA sequence encoding part of the ectodomain (amino acids 71-248) of human 4-1BB ligand was synthetized according to the P41273 sequence of Uniprot database. Constructs 2.21 and 2.22 were prepared as described in Example 4.2 for Constructs 2.17 and 2.18.

[0852] Table 50 shows the cDNA and amino acid sequences of the monovalent DP47/FAP(4B9)-targeted 4-1BB ligand (71-254) trimer-containing Fc (kih) fusion antigen binding molecule, wherein the dimeric 4-1BBL is fused to Fc hole chain (Construct 2.21).

TABLE 50
Sequences of FAP(4B9)-targeted/DP47 human 4-1BB ligand
trimer containing Fc (kih) fusion antigen binding molecule
Construct 2.21

| SEQ ID | | |
|---|---|---|
| NO: | Description | Sequence |
| 231 | nucleotide | GAGGTGCAATTGTTGGAGTCTGGGGGAGGCTTGGTACA |
| | sequence of | GCCTGGGGGGTCCCTGAGACTCTCCTGTGCAGCCTCCGG |
| | DP47(VH-CL) Fc | ATTCACCTTTAGCAGTTATGCCATGAGCTGGGTCCGCCA |
| | hole dimeric 4- | GGCTCCAGGGAAGGGGCTGGAGTGGGTCTCAGCTATTA |
| | 1BB ligand (71- | GTGGTAGTGGTGGTAGCACATACTACGCAGACTCCGTGA |
| | 248) chain | AGGGCCGGTTCACCATCTCCAGAGACAATTCCAAGAAC |
| | | ACGCTGTATCTGCAGATGAACAGCCTGAGAGCCGAGGA |
| | | CACGGCCGTATATTACTGTGCGAAAGGCAGCGGATTTGA |
| | | CTACTGGGGCCAAGGAACCCTGGTCACCGTCTCGAGCG |
| | | CTAGTGTGGCCGCTCCCTCCGTGTTTATCTTTCCCCCATC |
| | | CGATGAACAGCTGAAAAGCGGCACCGCCTCCGTCGTGT |
| | | GTCTGCTGAACAATTTTTACCCTAGGGAAGCTAAAGTGC |
| | | AGTGGAAAGTGGATAACGCACTGCAGTCCGGCAACTCC |
| | | CAGGAATCTGTGACAGAACAGGACTCCAAGGACAGCAC |
| | | CTACTCCCTGTCCTCCACCCTGACACTGTCTAAGGCTGA |
| | | TTATGAGAAACACAAAGTCTACGCCTGCGAAGTCACCC |
| | | ATCAGGGCCTGAGCTCGCCCGTCACAAAGAGCTTCAAC |
| | | AGGGGAGAGTGTGACAAAACTCACACATGCCCACCGTG |
| | | CCCAGCACCTGAAGCTGCAGGGGGACCGTCAGTCTTCCT |
| | | CTTCCCCCCAAAACCCAAGGACACCCTCATGATCTCCCG |
| | | GACCCCTGAGGTCACATGCGTGGTGGTGGACGTGAGCC |
| | | ACGAAGACCCTGAGGTCAAGTTCAACTGGTACGTGGAC |
| | | GGCGTGGAGGTGCATAATGCCAAGACAAAGCCGCGGGA |
| | | GGAGCAGTACAACAGCACGTACCGTGTGGTCAGCGTCC |
| | | TCACCGTCCTGCACCAGGACTGGCTGAATGGCAAGGAG |
| | | TACAAGTGCAAGGTCTCCAACAAAGCCCTCGGCGCCCC |
| | | CATCGAGAAAACCATCTCCAAAGCCAAAGGGCAGCCCC |
| | | GAGAACCACAGGTGTGCACCCTGCCCCCATCCCGGGAT |
| | | GAGCTGACCAAGAACCAGGTCAGCCTCTCGTGCGCAGT |
| | | CAAAGGCTTCTATCCCAGCGACATCGCCGTGGAGTGGG |
| | | AGAGCAATGGGCAGCCGGAGAACAACTACAAGACCACG |
| | | CCTCCCGTGCTGGACTCCGACGGCTCCTTCTTCCTCGTG |
| | | AGCAAGCTCACCGTGGACAAGAGCAGGTGGCAGCAGGG |
| | | GAACGTCTTCTCATGCTCCGTGATGCATGAGGCTCTGCA |
| | | CAACCACTACACGCAGAAGAGCCTCTCCCTGTCTCCGGG |
| | | TGGAGGCGGCGGAAGCGGAGGAGGAGGATCCAGAGAG |
| | | GGCCCTGAGCTGAGCCCTGATGATCCTGCCGGACTGCTG |
| | | GACCTGCGGCAGGGAATGTTTGCCCAGCTGGTGGCCCA |
| | | GAACGTGCTGCTGATCGATGGCCCCCTGTCCTGGTACAG |
| | | CGATCCTGGACTGGCTGGCGTGTCACTGACAGGCGGCCT |
| | | GAGCTACAAAGAGGACACCAAAGAACTGGTGGTGGCCA |
| | | AGGCCGGCGTGTACTACGTGTTCTTTCAGCTGGAACTGC |
| | | GGAGAGTGGTGGCCGGCGAAGGATCTGGCTCTGTGTCTC |
| | | TGGCCCTGCATCTGCAGCCTCTGAGATCTGCTGCTGGCG |
| | | CCGCTGCTCTGGCACTGACAGTGGATCTGCCTCCTGCCA |
| | | GCAGCGAGGCCCGGAATAGCGCATTTGGGTTTCAAGGC |
| | | AGGCTGCTGCACCTGTCTGCCGGCCAGAGGCTGGGAGT |
| | | GCATCTGCACACAGAGGCCAGGGCTAGACACGCCTGGC |
| | | AGCTGACACAGGGCGCTACAGTGCTGGGCCTGTTCAGA |
| | | GTGACCCCCGAGATTCCTGCCGGGCTC |
| 102 | nucleotide | see Table 1 |
| | sequence of FAP | |
| | (4B9) Fc knob | |
| | monomeric 4- | |
| | 1BB (71-248) | |
| | ligand | |
| 103 | nucleotide | see Table 1 |
| | sequence of anti- | |
| | FAP(4B9) light | |
| | chain | |
| 211 | nucleotide | see Table 42 |
| | sequence of DP47 | |
| | (VL-CH1) light | |
| | chain | |
| 232 | DP47(VH-CL) Fc | EVQLLESGGGLVQPGGSLRLSCAASGFTFSSYAMSWVRQA |
| | hole dimeric 4- | PGKGLEWVSAISGSGGSTYYADSVKGRFTISRDNSKNTLYL |
| | 1BB ligand (71- | QMNSLRAEDTAVYYCAKGSGFDYWGQGTLVTVSSASVA |
| | 248) chain | APSVFIFPPSDEQLKSGTASVVCLLNNFYPREAKVQWKVD |
| | | NALQSGNSQESVTEQDSKDSTYSLSSTLTLSKADYEKHKV |
| | | YACEVTHQGLSSPVTKSFNRGECDKTHTCPPCPAPEAAGG |
| | | PSVFLFPPKPKDTLMISRTPEVTCVVVDVSHEDPEVKFNWY |
| | | VDGVEVHNAKTKPREEQYNSTYRVVSVLTVLHQDWLNG |
| | | KEYKCKVSNKALGAPIEKTISKAKGQPREPQVCTLPPSRDE |
| | | LTKNQVSLSCAVKGFYPSDIAVEWESNGQPENNYKTTPPV |
| | | LDSDGSFFLVSKLTVDKSRWQQGNVFSCSVMHEALHNHY |
| | | TQKSLSLSPGGGGGSGGGGSREGPELSPDDPAGLLDLRQG |
| | | MFAQLVAQNVLLIDGPLSWYSDPGLAGVSLTGGLSYKEDT |
| | | KELVVAKAGVYYVFFQLELRRVVAGEGSGSVSLALHLQPL |
| | | RSAAGAAALALTVDLPPASSEARNSAFGFQGRLLHLSAGQ |
| | | RLGVHLHTEARARHAWQLTQGATVLGLFRVTPEIPAGL |
| 105 | FAP (4B9) Fc | see Table 1 |
| | knob monomeric | |
| | 4-1BB (71-248) | |
| | ligand | |
| 106 | anti-FAP(4B9) | see Table 1 |
| | light chain | |
| 214 | DP47 (VL-CH1) | see Table 42 |
| | light chain | |

[0853] Table 51 shows the cDNA and amino acid sequences of the monovalent DP47/FAP(4B9)-targeted 4-1BB ligand (71-254) trimer-containing Fc (kih) fusion antigen binding molecule, wherein the dimeric 4-1BBL is fused to the knob chain (Construct 2.22).

TABLE 51
Sequences of FAP(4B9)-targeted human 4-1BB ligand trimer
containing Fc (kih) fusion molecule Construct 2.22

| SEQ ID | | |
|---|---|---|
| NO: | Description | Sequence |
| 233 | nucleotide | GAGGTGCAATTGTTGGAGTCTGGGGGAGGCTTGGTACA |
| | sequence of DP47 | GCCTGGGGGGTCCCTGAGACTCTCCTGTGCAGCCTCCGG |
| | (VH-CL) Fc hole | ATTCACCTTTAGCAGTTATGCCATGAGCTGGGTCCGCCA |
| | monomeric 4- | GGCTCCAGGGAAGGGGCTGGAGTGGGTCTCAGCTATTA |
| | 1BBL (71-248) | GTGGTAGTGGTGGTAGCACATACTACGCAGACTCCGTGA |
| | chain | AGGGCCGGTTCACCATCTCCAGAGACAATTCCAAGAAC |
| | | ACGCTGTATCTGCAGATGAACAGCCTGAGAGCCGAGGA |
| | | CACGGCCGTATATTACTGTGCGAAAGGCAGCGGATTTGA |
| | | CTACTGGGGCCAAGGAACCCTGGTCACCGTCTCGAGCG |
| | | CTAGTGTGGCCGCTCCCTCCGTGTTTATCTTTCCCCCATC |
| | | CGATGAACAGCTGAAAAGCGGCACCGCCTCCGTCGTGT |
| | | GTCTGCTGAACAATTTTTACCCTAGGGAAGCTAAAGTGC |
| | | AGTGGAAAGTGGATAACGCACTGCAGTCCGGCAACTCC |
| | | CAGGAATCTGTGACAGAACAGGACTCCAAGGACAGCAC |
| | | CTACTCCCTGTCCTCCACCCTGACACTGTCTAAGGCTGA |
| | | TTATGAGAAACACAAAGTCTACGCCTGCGAAGTCACCC |
| | | ATCAGGGCCTGAGCTCGCCCGTCACAAAGAGCTTCAAC |
| | | AGGGGAGAGTGTGACAAAACTCACACATGCCCACCGTG |
| | | CCCAGCACCTGAAGCTGCAGGGGGACCGTCAGTCTTCCT |
| | | CTTCCCCCCAAAACCCAAGGACACCCTCATGATCTCCCG |
| | | GACCCCTGAGGTCACATGCGTGGTGGTGGACGTGAGCC |
| | | ACGAAGACCCTGAGGTCAAGTTCAACTGGTACGTGGAC |
| | | GGCGTGGAGGTGCATAATGCCAAGACAAAGCCGCGGGA |
| | | GGAGCAGTACAACAGCACGTACCGTGTGGTCAGCGTCC |
| | | TCACCGTCCTGCACCAGGACTGGCTGAATGGCAAGGAG |
| | | TACAAGTGCAAGGTCTCCAACAAAGCCCTCGGCGCCCC |
| | | CATCGAGAAAACCATCTCCAAAGCCAAAGGGCAGCCCC |
| | | GAGAACCACAGGTGTGCACCCTGCCCCCATCCCGGGAT |
| | | GAGCTGACCAAGAACCAGGTCAGCCTCTCGTGCGCAGT |
| | | CAAAGGCTTCTATCCCAGCGACATCGCCGTGGAGTGGG |
| | | AGAGCAATGGGCAGCCGGAGAACAACTACAAGACCACG |
| | | CCTCCCGTGCTGGACTCCGACGGCTCCTTCTTCCTCGTG |
| | | AGCAAGCTCACCGTGGACAAGAGCAGGTGGCAGCAGGG |
| | | GAACGTCTTCTCATGCTCCGTGATGCATGAGGCTCTGCA |
| | | CAACCACTACACGCAGAAGAGCCTCTCCCTGTCTCCGGG |
| | | TGGAGGCGGCGGAAGCGGAGGAGGAGGATCCAGAGAG |
| | | GGCCCTGAGCTGAGCCCTGATGATCCTGCCGGACTGCTG |
| | | GACCTGCGGCAGGGAATGTTTGCCCAGCTGGTGGCCCA |
| | | GAACGTGCTGCTGATCGATGGCCCCCTGTCCTGGTACAG |
| | | CGATCCTGGACTGGCTGGCGTGTCACTGACAGGCGGCCT |
| | | GAGCTACAAAGAGGACACCAAAGAACTGGTGGTGGCCA |
| | | AGGCCGGCGTGTACTACGTGTTCTTTCAGCTGGAACTGC |
| | | GGAGAGTGGTGGCCGGCGAAGGATCTGGCTCTGTGTCTC |
| | | TGGCCCTGCATCTGCAGCCTCTGAGATCTGCTGCTGGCG |
| | | CCGCTGCTCTGGCACTGACAGTGGATCTGCCTCCTGCCA |
| | | GCAGCGAGGCCCGGAATAGCGCATTTGGGTTTCAAGGC |
| | | AGGCTGCTGCACCTGTCTGCCGGCCAGAGGCTGGGAGT |
| | | GCATCTGCACACAGAGGCCAGGGCTAGACACGCCTGGC |
| | | AGCTGACACAGGGCGCTACAGTGCTGGGCCTGTTCAGA |
| | | GTGACCCCCGAGATTCCTGCCGGGCTC |
| 108 | nucleotide | see Table 2 |
| | sequence of FAP | |
| | (4B9) Fc knob | |
| | dimeric 4-1BB | |
| | ligand (71-248) | |
| | chain | |
| 103 | nucleotide | See Table 1 |
| | sequence of anti- | |
| | FAP(4B9) light | |
| | chain | |
| 211 | nucleotide | see Table 42 |
| | sequence of DP47 | |
| | (VL-CH1) light | |
| | chain | |
| 234 | DP47 (VH-CL) | EVQLLESGGGLVQPGGSLRLSCAASGFTFSSYAMSWVRQA |
| | Fc hole | PGKGLEWVSAISGSGGSTYYADSVKGRFTISRDNSKNTLYL |
| | monomeric 4- | QMNSLRAEDTAVYYCAKGSGFDYWGQGTLVTVSSASVA |
| | 1BBL (71-248) | APSVFIFPPSDEQLKSGTASVVCLLNNFYPREAKVQWKVD |
| | chain | NALQSGNSQESVTEQDSKDSTYSLSSTLTLSKADYEKHKV |
| | | YACEVTHQGLSSPVTKSFNRGECDKTHTCPPCPAPEAAGG |
| | | PSVFLFPPKPKDTLMISRTPEVTCVVVDVSHEDPEVKFNWY |
| | | VDGVEVHNAKTKPREEQYNSTYRVVSVLTVLHQDWLNG |
| | | KEYKCKVSNKALGAPIEKTISKAKGQPREPQVCTLPPSRDE |
| | | LTKNQVSLSCAVKGFYPSDIAVEWESNGQPENNYKTTPPV |
| | | LDSDGSFFLVSKLTVDKSRWQQGNVFSCSVMHEALHNHY |
| | | TQKSLSLSPGGGGGSGGGGSREGPELSPDDPAGLLDLRQG |
| | | MFAQLVAQNVLLIDGPLSWYSDPGLAGVSLTGGLSYKEDT |
| | | KELVVAKAGVYYVFFQLELRRVVAGEGSGSVSLALHLQPL |
| | | RSAAGAAALALTVDLPPASSEARNSAFGFQGRLLHLSAGQ |
| | | RLGVHLHTEARARHAWQLTQGATVLGLFRVTPEIPAGL |
| 110 | anti-FAP(4B9) Fc | see Table 2 |
| | knob dimeric 4- | |
| | 1BB ligand (71- | |
| | 248) chain | |
| 106 | anti-FAP(4B9) | See Table 1 |
| | light chain | |
| 214 | DP47 (VL-CH1) | see Table 42 |
| | light chain | |

### Example 5

### Production of Monovalent FAP-Targeted Human DP47/4-1BB Ligand Trimer-Containing Fc Fusion Antigen Binding Molecules

[0854] The monovalent FAP-targeted trimeric 4-1BB ligand C-terminal Fc (kih) fusion antigen binding molecule encoding sequences were cloned into a plasmid vector, which drives expression of the insert from an MPSV promoter and contains a synthetic polyA sequence located at the 3′ end of the CDS. In addition, the vector contains an EBV OriP sequence for episomal maintenance of the plasmid.

[0855] The split trimeric 4-1BB ligand Fc (kih) fusion molecules were produced by co-transfecting HEK293-EBNA cells with the mammalian expression vectors using polyethylenimine. The cells were transfected with the corresponding expression vectors. For constructs 2.15 to 2.22, at a 1:1:1:1 ratio (“vector Fc hole chain”: “vector light chain 1”: “vector Fc knob chain”: “vector light chain 2”). The production and purification was carried out as described in Example 2.

[0856] Table 52 summarizes the yield and final monomer content of an exemplary DP47/FAP(4B9)-targeted split trimeric C-terminal 4-1BB ligand Fc(kih) fusion antigen binding molecule.

TABLE 52
Biochemical analysis of an exemplary targeted split trimeric C-terminal
4-1BB ligand Fc(kih) fusion antigen binding molecule

| | Monomer | |
|---|---|---|
| | [%] | Yield |
| Construct | (SEC) | [mg/l] |
| monovalent FAP(4B9) targeted split trimeric 4-1BB | 98.9 | 14.5 |
| ligand C-terminal Fc (kih) fusion (construct 2.15) | | |

### Example 5

### Determination of Simultaneous Binding of DP47/FAP(4B9)-Targeted C-Terminal 4-1BB Split Trimeric Ligand Fc Fusion Antigen Binding Molecules by Surface Plasmon Resonance

[0857] The capacity of binding simultaneously to human 4-1BB Fc(kih) and human FAP was assessed by surface plasmon resonance (SPR). All SPR experiments were performed on a Biacore T200 at 25° C. with HBS-EP as running buffer (0.01 M HEPES pH 7.4, 0.15 M NaCl, 3 mM EDTA, 0.005% Surfactant P20, Biacore, Freiburg/Germany).

[0858] Biotinylated human 4-1BB Fc(kih) was directly coupled to a flow cell of a streptavidin (SA) sensor chip. Immobilization levels up to 200 resonance units (RU) were used. The targeted trimeric C-terminal 4-1BB ligand Fc (kih) fusion molecules were passed at a concentration range of 200 nM with a flow of 30 μL/minute through the flow cells over 90 seconds and dissociation was set to zero sec. Human FAP was injected as second analyte with a flow of 30 μL/minute through the flow cells over 90 seconds at a concentration of 500 nM (FIG. 6A). The dissociation was monitored for 120 sec. Bulk refractive index differences were corrected for by subtracting the response obtained in a reference flow cell, where no protein was immobilized. All bispecific constructs could bind simultaneously human 4-1BB and human FAP (FIG. 6B).

### Example 6

### Functional Characterization of Monovalent FAP-Targeted C-Terminal 4-1BB Split Trimeric Ligand Fc Fusion Antigen Binding Molecules

[0859] 6.1 Binding on Fresh and Activated Human PBMCs

[0860] Buffy coats were obtained from the Zurich blood donation center. To isolate fresh peripheral blood mononuclear cells (PBMCs) the buffy coat was diluted with the same volume of DPBS (Gibco by Life Technologies, Cat. No. 14190 326). 50 mL polypropylene centrifuge tubes (TPP, Cat.-No. 91050) were supplied with 15 mL Histopaque 1077 (SIGMA Life Science, Cat.-No. 10771, polysucrose and sodium diatrizoate, adjusted to a density of 1.077 g/mL) and the diluted buffy coat contents were layered above the Histopaque 1077. The tubes were centrifuged for 30 min at 450×g. PBMCs were then collected from the interface, washed three times with DPBS and resuspended in T cell medium consisting of RPMI 1640 medium (Gibco by Life Technology, Cat. No. 42401-042) supplied with 10% (v/v) Fetal Bovine Serum (FBS, US-origin, PAN biotech, P30-2009, Lot P150307GI, gamma irradiated mycoplasma free, heat inactivated 35 min 56° C.), 1% (v/v) GlutaMAX I (GIBCO by Life Technologies, Cat. No. 35050 038), 1 mM Sodium-Pyruvat (SIGMA, Cat. No. S8636), 1% (v/v) MEM non-essential amino acids (SIGMA, Cat.-No. M7145) and 50 μM β-Mercaptoethanol (SIGMA, M3148).

[0861] PBMCs were used directly after isolation (binding on fresh human PBMCs) or they were stimulated to induce 4-1BB expression on the cell surface of T cells (binding on activated human PBMCs). To induce 4-1BB upregulation on human CD8 T cells, 6-well tissue culture plates (TTP, Cat.-No. 92006) were coated with 10 ug/mL anti-human CD3 (clone OKT3, Mouse IgG2a, BioLegend, Cat.-No. 317315) and 2 ug/mL anti-human CD28 (clone CD28.2, Mouse IgG1, BioLegend, Cat.-No. 302923) in DPBS at 4° C. overnigh; shortly before further use plates were washed twice with DPBS to remove not coated antibodies. Freshly isolated PBMCs were set to 1×10⁶ cells/mL in T cell medium (same medium as described above), seeded to the aCD³/ₐCD28 coated 6-well plates and cultured for 3 days at 37° C. and 5% CO₂.

[0862] For binding assay, 0.1×10⁶ fresh or activated PBMCs were added to each well of a round-bottom suspension cell 96-well plates (greiner bio-one, cellstar, Cat. No. 650185). Plates were centrifuged 5 minutes with 350×g and at 4° C. and supernatant were discarded. Afterwards cells were stained in 100 μL/well DPBS containing 1:5000 diluted fixable viability dye eF660 (eBioscience, Cat.-No. 65-0864-18) for 30 minutes at 4° C. in the dark. Cells were washed once with 200 μL ice cold cold DPBS buffer. Next, 50 μL/well of 4° C. cold FACS buffer (DPBS supplied with 2% FBS, 5 mM EDTA pH8 (Amresco, Cat. No. E177) and 7.5 mM Sodium azide (Sigma-Aldrich, Cat.-No. S2002)) containing monovalent FAP-targeted C-terminal 4-1BB split trimeric ligand Fc fusion antigen binding molecules (in particular construct 2.11 or construct 2.15), as positive control construct 2.4 and as negative controls Control D and Control F (prepared as described in Example 1.11) were added and cells were incubated for 60 minutes at 4° C., washed three times with 200 μL/well 4° C. FACS buffer. Cells were further resuspended in 50 μL/well of 4° C. cold FACS buffer containing 0.67 μg/mL anti-human CD45-AF488 (clone HI30, mouse igG1k, BioLegend, Cat.-No. 304019), 0.33 μg/mL anti-human CD8a-BV510 (clone SKI, mouse IgG1k, BioLegend, Cat.-No. 344732), 0.23 μg/mL anti-human CD4-BV421 (clone OKT4, mouse IgG2bκ, BioLegend, Cat.-No. 317434), 0.67 μg/mL anti-human CD3-PerCP-Cy5.5 (clone UCHT1, mouse IgG1k, BioLegend, Cat.-No. 300430), 0.67 μg/mL anti-human CD19-PE/Cy7 (clone HIB19, mouse IgG1k, BioLegend, Cat.-No. 302216), 5 μg/mL PE-conjugated AffiniPure anti-human IgG F(ab′)2-fragment-specific goat F(ab′)2 fragment (Jackson ImmunoResearch, Cat. No. 109 116 098) and incubated for 30 min at 4° C. Cells were washed twice with 200 μL/well 4° C. FACS buffer and then fixed with DPBS supplied with 1% Formaldehyde (Sigma, HT501320-9.5L). Cells were resuspended in 100 μL/well FACS-buffer and acquired using the MACS Quant Analyzer 10 (Miltenyi Biotech). Data was analyzed using FlowJo V10 (FlowJo, LLC) and GraphPad Prism 6.04 (GraphPad Software, Inc).

[0863] Gates were set on living CD45⁺ CD3⁺ CD19^{neg} CD8^{neg} CD4⁺ T cells, CD45⁺ CD3⁺ CD19^{neg} CD4^{neg} CD8⁺ T cells, CD45⁺ CD3⁺ CD4^{neg} CD8^{neg} γδ T cells and CD45⁺ CD3^{neg} CD19³⁰ B cells and Geo Mean of fluorescence intensity of PE-conjugated AffiniPure anti-human IgG IgG Fcγ-fragment-specific goat F(ab′)2 fragment was blotted against the titrated concentration of FAP-targeted or untargeted C-terminal 4-1BB split trimeric ligand Fc fusion antigen binding molecules. As shown in FIGS. 7A-H and FIGS. 8A-F, only after activation of human PBMCs 4-1BB was upregulated on human CD4⁺ and CD8⁺ T cells. In Tables 53a and 53b the EC₅₀ values are summarized for the binding curves to activated human PBMCs.

TABLE 53a
EC₅₀ values of binding curves to activated human PBMCs (construct 2.11)
(see FIGS. 8A-C)

| | | | construct |
|---|---|---|---|
| | control D | construct 2.4 | 2.11 |
| EC₅₀ [nM] on activated CD4⁺ T | 0.37 | 0.41 | 0.28 |
| cells | | | |
| EC₅₀ [nM] on activated CD8⁺ T | 0.63 | 1.13 | 0.41 |
| cells | | | |
| EC₅₀ [nM] on activated γδ T cells | 0.28 | 0.64 | 0.36 |

TABLE 53b
EC₅₀ values of binding curves to activated human PBMCs (construct 2.15)
(see FIGS. 8D-F)

| | | | construct |
|---|---|---|---|
| | control D | construct 2.4 | 2.15 |
| EC₅₀ [nM] on activated CD4⁺ T | 0.08 | 0.10 | 0.11 |
| cells | | | |
| EC₅₀ [nM] on activated CD8⁺ T | 0.15 | 0.23 | 0.17 |
| cells | | | |
| EC₅₀ [nM] on activated γδ T cells | 0.09 | 0.11 | 0.12 |

[0864] 6.2 Binding of FAP-Expressing Tumor Cells

[0865] For binding assays on FAP expressing cells different FAP-expressing tumor cells were used: human melanoma cell line MV-3 (first published: van Muijen G N, Jansen K F, Cornelissen I M, Smeets D F, Beck J L, Ruiter D J. Establishment and characterization of a human melanoma cell line (MV3) which is highly metastatic in nude mice. Int J Cancer. 1991 Apr. 22; 48(1):85-91) and the human melanoma cell line WM-266-4 (ATCC CRL-1676).

[0866] 0.1×10⁶ tumor cells resuspended in DPBS (Gibco by Life Technologies, Cat. No. 14190 326) were added to each well of a round-bottom suspension cell 96-well plates (greiner bio-one, cellstar, Cat. No. 650185). Cells were washed once with 200 4 DPBS. Cells were resuspended in 100 μL/well of 4° C. cold DPBS buffer containing 1:5000 diluted Fixable Viability Dye eFluor 660 (eBioscience, Cat. No. 65-0864-18) and plates were incubated for 30 minutes at 4° C. Cells were washed once with 200 μL/well 4° C. cold DPBS buffer and resuspended in 50 μL/well of 4° C. cold FACS buffer (DPBS supplied with 2% FBS, 5 mM EDTA pH8 (Amresco, Cat. No. E177) and 7.5 mM Sodium azide (Sigma-Aldrich S2002)) containing construct 2.11 or construct 2.15, as positive control construct 2.4 and as negative controls control D and control F at a series of concentrations, followed by incubation for 1 hour at 4° C. After extensive washing, cells were further stained with 50 μL/well of 4° C. cold FACS buffer containing 5 μg/mL PE-conjugated AffiniPure anti-human IgG F(ab′)2-fragment-specific goat F(ab′)2 fragment (Jackson ImmunoResearch, Cat. No. 109 116 098) for 30 minutes at 4° C. Cells were washed twice with 200 μL/well 4° C. FACS buffer and cells were fixed in 50 μL/well DPBS containing 1% Formaldehyde (Sigma, HT501320-9.5L). Cells were resuspended in 100 μL/well FACS-buffer and acquired using the MACS Quant Analyzer 10 (Miltenyi Biotech). Data was analyzed using FlowJo V10 (FlowJo, LLC) and GraphPad Prism 6.04 (GraphPad Software, Inc).

[0867] Gates were set on living tumor cells and geo means of fluorescence intensity of PE-conjugated AffiniPure anti-human IgG IgG Fcγ-fragment-specific goat F(ab′)2 fragment were blotted against the titrated concentration of FAP-targeted or untargeted C-terminal 4-1BB split trimeric ligand Fc fusion antigen binding molecules. As shown in FIGS. 9A and B, only the FAP-targeted split trimeric 4-1BB ligand fusion molecules construct 2.4 and construct 2.11 bound to FAP-expressing tumor cells MV-3 amd WM-266-4 whereas the untargeted Isotype control control F and the non-targeted split trimeric 4-1BB ligand fusion molecule control D did not bind to the tumor cells. In FIGS. 9C and 9D it is shown that the trispecific DP47/FAP-targeted split trimeric 4-1BB ligand fusion molecule construct 2.15 also bound to FAP-expressing tumor cells MV-3 amd WM-266-4. In Tables 54a and 54b the EC₅₀ values of the FAP⁺ tumor binding curves are listed.

TABLE 54a
EC₅₀ values of binding curves to FAP-expressing tumor cells
(FIGS. 9A and B)

| | Construct 2.4 | Construct 2.11 |
|---|---|---|
| EC₅₀ [nM] on MV-3 | 2.16 | 0.82 |
| EC₅₀ [nM] on WM-266-4 | 3.43 | 1.16 |

TABLE 54a
EC₅₀ values of binding curves to FAP-expressing tumor cells
(FIGS. 9C and D)

| | Construct 2.4 | Construct 2.11 |
|---|---|---|
| EC₅₀ [nM] on MV-3 | 2.21 | 3.42 |
| EC₅₀ [nM] on WM-266-4 | 1.18 | 2.4 |

[0868] 6.3 Biological Activity: NF-κB Activation of Human 4-1BB Expressing HeLa Reporter Cell Line

[0869] 6.3.1 Generation of HeLa Reporter Cells Expressing Human 4-1BB and NF-κB-Luciferase

[0870] The human-papilloma-virus-18-induced cervix carcinoma cell line HeLa (ATCC CCL-2) was transduced with a plasmid based on the expression vector pETR10829, which contains the sequence of human 4-1BB (Uniprot accession Q07011) under control of a CMV-promoter and a puromycin resistance gene. Cells were cultured in DMEM-medium (Gibco by Life Technologies Cat. No. 42430-025) supplied with 10% Fetal Bovine Serum (FBS, GIBCO by Life Technologies, Cat. No. 16000-044, Lot. No. 941273, gamma-irradiated mycoplasma free, heat inactivated at 56° C. for 35 minutes), 1% GlutaMAX-I (GIBCO by Life Technologies, Cat.-No. 35050-038) and 3 μg/mL Puromycin (InvivoGen, Cat-No. ant-pr). 4-1BB-transduced HeLa cells were tested for 4-1BB expression by flow cytometry: 0.2×106 living cells were resuspended in 100 μL FACS buffer (DPBS supplied with 2% FBS, 5 mM EDTA pH 8 (Amresco, Cat. No. E177) and 7.5 mM Sodium Azide (Sigma-Aldrich, Cat. No. S2002)) containing 0.1 μg PerCP/Cy5.5 conjugated anti-human 4-1BB mouse IgG1κ clone 4B4-1 (BioLegend Cat. No. 309814) or its isotype control (PerCP/Cy5.5 conjugated mouse IgG1κ isotype control antibody clone MOPC 21, BioLegend Cat. No. 400150) and incubated for 30 minutes at 4° C. Cells were washed twice with FACS buffer, resuspended in 300 μL FACS buffer containing 0.06 μg DAPI (Santa Cruz Biotec, Cat. No. Sc-3598) and acquired using a 5-laser LSR-Fortessa (BD Bioscience, DIVA software). Limited dilutions were performed to generate single clones as following: Human-4-1BB transduced HeLa cells were resuspended in medium to a concentration of 10, 5 and 2.5 cells/mL and 200 μL of cell suspensions were transferred to round bottom tissue-culture treated 96-well plates (6 plates/cell concentration, TPP Cat. No. 92697). Single clones were harvested, expanded and tested for 4-1BB expression as described above. The clone with the highest expression of 4-1BB (clone 5) was chosen for subsequent transfection with the NFκB-luciferase expression-vector 5495p Tranlucent HygB. The vector confers transfected cells both with resistance to hygromycin B and capacity to express luciferase under control of NFκB-response element (Panomics, Cat. No. LR0051). Human-4-1BB HeLa clone 5 cells were cultured to 70% confluence. 50 μg (40 μL) linearized (restriction enzymes Asel and Sale 5495p Tranlucent HygB expression vector were added to a sterile 0.4 cm Gene Pulser/MicroPulser Cuvette (Biorad, Cat.-No, 165-2081). 2.5×10⁶ human-4-1BB HeLa clone 5 cells in 400 μl supplement-free DMEM were added and mixed carefully with the plasmid solution. Transfection of cells was performed using a Gene Pulser Xcell total system (Biorad, Cat No. 165 2660) under the following settings: exponential pulse, capacitance 500 μF, voltage 160 V, resistance ∞. Immediately after the pulse transfected cells were transferred to a tissue culture flask 75 cm² (TPP, Cat. No. 90075) with 15 mL 37° C. warm DMEM-Medium (Gibco by Life Technologies Cat. No. 42430-025) supplied with 10% FBS and 1% GlutaMAX I (GIBCO by Life Technologies, Cat. No. 35050 038). Next day, culture medium containing 3 μg/mL Puromycin (InvivoGen, Cat No. ant pr) and 200 μg/mL Hygromycin B (Roche, Cat.-No. 10843555001) was added. Surviving cells were expanded and limited dilution was performed as described above to generate single clones. Clones were tested for 4-1BB expression as described above and for NFκB-Luciferase activity as following: Clones were harvested in selection medium and counted using a Cell Counter Vi-cell xr 2.03 (Beckman Coulter, Cat. No. 731050). Cells were set to a cell density of 0.33×10⁶ cells/mL and 150 μL of this cell suspension were transferred to each well of a sterile white 96-well flat bottom tissue culture plate with lid (greiner bio one, Cat. No. 655083) and as a control to normal 96 well flat bottom tissue culture plate (TPP Cat. No. 92096) to test survival and cell density the next day. Cells were incubated at 37° C. and 5% CO2 overnight. The next day 50 μL of medium containing different concentrations of recombinant human tumor necrosis factor alpha (rhTNFα, PeproTech, Cat.-No. 300 01A) were added to each well of a 96-well plate resulting in final concentration of rhTNFα of 100, 50, 25, 12.5, 6.25 and 0 ng/well. Cells were incubated for 6 hours at 37° C. and 5% CO2 and then washed three times with 200 μL/well DPBS. Reporter Lysis Buffer (Promega, Cat-No: E3971) was added to each well (30 μl) and the plates were stored over night at −20° C. The next day frozen cell plates and Detection Buffer (Luciferase 1000 Assay System, Promega, Cat. No. E4550) were thawed to room temperature. 100 μL of detection buffer were added to each well and the plate was measured as fast as possible using a SpectraMax M5/M5e microplate reader and the SoftMax Pro Software (Molecular Devices). Measured URLs above control (no rhTNFα added) were taken as luciferase activity. The NFκB-luc-4-1BB-HeLa clone 26 was chosen for further use exhibiting the highest luciferase activity and a considerable level of 4-1BB-expression.

[0871] 6.3.2 NF-κB Activation of HeLa Reporter Cells Expressing Human 4-1BB Co-Cultured with FAP-Expressing Tumor Cells

[0872] NFκB-luc-4-1BB-HeLa clone 26 cells were washed with DPBS (Gibco by Life Technologies, Cat. No. 14190 326) and treated with 0.05 Trypsin EDTA (Gibco by Life Technologies Cat. No. 25300 054) for 5 min at 37° C. Cells were harvested and resuspended in DMEM Medium (Gibco by Life Technologies Cat. No. 42430 025) supplied with 10% Fetal Calf Serum (FBS, US-origin, PAN biotech, P30-2009, Lot P150307GI, gamma irradiated mycoplasma free, heat inactivated 35 min 56° C.) and 1% GlutaMAX-I (GIBCO by Life Technologies, Cat. No. 35050 038). Cells were counted using Cell Counter Vi-cell xr 2.03 (Beckman Coulter, Cat. No. 731050) and set to a cell density of 0.2×10⁶ cells/mL. 100 μL (2×10⁴ cells) of this cell suspension were transferred to each well of a sterile white 96-well flat bottom tissue culture plate with lid (greiner bio one, Cat. No. 655083) and the plates were incubated at 37° C. and 5% CO₂ overnight. The next day 50 μL of medium containing different titrated concentrations of construct 2.11 were added. As positive control construct 2.4 and as negative controls control D and control F (as described in Example 1.11) were added. For FAP-binding-mediated crosslinking the FAP-expressing line MV-3 (first published: van Muijen G N, Jansen K F, Cornelissen I M, Smeets D F, Beck J L, Ruiter D J. Establishment and characterization of a human melanoma cell line (MV3) which is highly metastatic in nude mice. Int J Cancer. 1991 Apr. 22; 48(1):85-91), human melanoma cell line WM-266-4 (ATCC CRL-1676) or FAP-expressing mouse fibroblast cell lines NIH/3T3 transfected with human FAP (NIH/3T3-huFAP clone 19) were used.

[0873] Therefore FAP expressing tumor cell lines were washed with DPBS (Gibco by Life Technologies, Cat. No. 14190 326) and treated with enzyme-free, PBS-based Cell Dissociation Buffer (Gibco by Life Technologies, Cat.-No. 13151-014) for 10 minutes at 37° C. Afterwards cell were harvested and counted using Cell Counter Vi-cell xr 2.03. Cells were resuspended in DEM supplied with 10% FBS and 1% L-GlutaMAX-I to 2×10⁶ cells/mL and 50 μL were added/well. After adding crosslinking FAP-expressing tumor cells plates were incubated for 6 hours at 37° C. and 5% CO₂. White flat bottom 96-well plates were washed three times with 200 μL/well DPBS. 40 μl fresh prepared Reporter Lysis Buffer (Promega, Cat-No: E3971) were added to each well and the plate were stored over night at −20° C. The next day frozen plates and detection buffer (Luciferase 1000 Assay System, Promega, Cat. No. E4550) were thawed to room temperature. 100 uL of detection buffer were added to each well and plates were measured as fast as possible using the SpectraMax M5/M5e microplate reader and SoftMax Pro Software (Molecular Devices) with following settings: for luciferase (RLUs), 500 ms integration time, no filter, collecting all wave length and top reading. The setup of the assay is shown in FIG. 10 and the activities as measured for Constructs 2.11, 2.15 and 2.4 and Controls are shown in FIG. 11. In Table 55 the EC₅₀ values of the NFκB-activation-induced Luciferase activity-curves are listed.

TABLE 55
EC₅₀ values of NFκB-activation-induced Luciferase activity-curves

| | Construct 2.4 | Construct 2.11 | Construct 2.15 |
|---|---|---|---|
| EC₅₀ [nM] on MV-3 | 0.15 | 0.18 | 0.16 |
| EC₅₀ [nM] on 3T3- | 0.06 | 0.08 | 0.10 |
| huFAP | | | |

[0874] 6.4 Activation Assay of Human PBMCs in the Presence of FAP-Expressing Cells

[0875] For FAP-binding-mediated crosslinking the FAP-expressing mouse fibroblast cell lines NIH/3T3 transfected with human FAP (NIH/3T3-huFAP clone 19) was used. The cells were generated by transfection of mouse embryonic fibroblast NIH/3T3 cells (ATCC CRL-1658) with the expression pETR4921 plasmid encoding human FAP under a CMV promoter. Cells were maintained DMEM (Gibco by Life Technologies Cat.-No. 42430-025) supplied with 10% Calf Serum (CS, Iron supplemented from formula-fed calves, Sigma-Aldrich, C8056-500 mL) in the presence of 1.5 μg/mL puromycin (InvivoGen, Cat.-No.: ant-pr-5).

[0876] NIH/3T3-huFAP clone 19 cells were resuspended in T cell medium consisting of RPMI 1640 (GIBCO by Life Technologies, Cat.-No. 42401-042) supplied with 10% fetal bovine serum (FBS, US-origin, PAN biotech, P30-2009, Lot P150307GI, gamma irradiated mycoplasma free, heat inactivated 35 min 56° C.), 1% L-GlutaMAX-I (GIBCO by Life Technologies, Cat-No. 35050-038), 1 mM Sodium-Pyruvat (SIGMA-Aldrich, Cat.-No. 58636) , 1% MEM-Non essential Aminoacid Solution (SIGMA-Aldrich, Cat.-No. M7145), 50 uM β-Mercaptoethanol (Sigma-Aldrich, Cyt.-No. M3148) and irradiated with 50 Gy (X-Ray Irradiator RS 2000, Rad source). 2×10⁴ NIH/3T3-huFAP clone 19 cells in 50 μL T cell medium were seeded to each well of a round bottom tissue culture 96-well plate (TTP, Cat.-No. 92697). 50 μL of T cell medium containing different titrated concentrations of construct 2.11 were added. As positive control construct 2.4 and as negative controls control D and control F as described in Example 1.11 were added. Human PBMCs were labeled in 37° C. warm DPBS containing 40 nM CFDA-SE (SIGMA-Aldrich, Cat.-No. 21888-25MG-F) for 15 min at 37° C. CFSE-labeling was stopped by adding FBS, PBMCs were washed twice and resuspended in T cell medium to a final concentration of 1.5×10⁶ cells/mL. 50 μL of this PBMC cell solution were seeded to each well to add 7.5×10⁴ CFSE-labeled PBMCs well. Finally a stock solution of T cell medium containing 2 mM agonistic anti-human CD3 antibody (clone V9, human IgG1, described in Rodrigues et al., Int J Cancer Suppl 7, 45-50 (1992) and U.S. Pat. No. 6,054,297) was prepared and 50 μL/well were added to each well giving a final concentration of 0.5 mM anti-human CD3 human IgG1 clone V9.

[0877] Plates were incubated for 4 days at 37° C. Cells were washed with DPBS and stained with 100 μL/well DPBS containing 1:1000 diluted LIVE/DEAD® Fixable Aqua Dead Cell Stain Kit (Molecular Probes by Life Technology, Cat.-No. L34957) for 30 min at 4° C. Cells were washed once with 200 μL/well DPBS and stained with 50 μL FACS buffer (DPBS supplied with 2% FBS, 5 mM EDTA pH8 (Amresco, Cat. No. E177) and 7.5 mM Sodium azide (Sigma-Aldrich S2002)) containing 0.1 μg/mL PerCP-Cy5.5-conjugated anti-human CD137 mouse IgG1 (clone 4B4-1, BioLegend, Cat.-No. 309814), 0.1 μg/mL PE/Cy7-conjugated anti-human PD-1 mouse IgG1κ (clone EH12.2H7, BioLegend, Cat.-No. 329918), 0.03 μg/mL APC-conjugated anti-human CD25 mouse IgG1κ (clone BC96, BioLegend, Cat.-No. 302610), 0.06 μg/mL APC/Cy7-conjugated anti-human CD8 Mouse IgG1κ (clone RPA-T8, BioLegend, Cat.-No. 3301016), BV421-conjugated anti-human CD4 Mouse IgG1κ (clone RPA-T4, BioLegend, Cat.-No. 300532) for 30 min at 4° C. Cells were washed twice with 200 μL/well DPBS and incubated for 30 min at 4° C. with 50 μL/well freshly prepared FoxP3 Perm/Fix buffer (eBioscience Cat.-No. 00-5123). Cells were washed twice with 200 μL/well DPBS, resuspended in 50 μL/well freshly prepared Perm-buffer (eBioscience Cat.-No 00-8333) supplied with PE-conjugated 1:250 diluted anti-human Granzyme B mouse IgG1κ (clone GB11, Lot 4269803, BD Pharmingen, Cat.-No. 561142) and incubated for 1 h at 4° C. Plates were washed twice with 200 μL/well DPBS and cells were fixed for 15 min with DPBS containing 1% Formaldehyde (Sigma, HT501320-9.5L). Cells were resuspended in 100 μL/well FACS-buffer and acquired using the MACS Quant Analyzer 10 (Miltenyi Biotech). Data was analyzed using FlowJo V10 (FlowJo, LLC) and GraphPad Prism 6.04 (GraphPad Software, Inc).

[0878] As shown in FIG. 13, only the FAP (4B9)-targeted split trimeric 4-1BBL fusion molecules Construct 2.11 and the positive control Construct 2.4 induced a concentration-dependent increase of surface expressed CD25 and 4-1BB (CD137) on CD8⁺ T cells. The negative control molecules Control F and D did not induce this up-regulation of activation markers. The EC50 values of CD25 and 4-1BB up-regulation on CD8⁺ T cells are shown in Table 56.

TABLE 56
EC₅₀ values of induced up-regulation of activation markers 4-1BB
(CD137) and CD25 on CD8⁺ T cells

| | Construct 2.4 | Construct 2.11 |
|---|---|---|
| EC₅₀ [nM] of CD25-upregulation | 0.03 | 0.07 |
| on CD8+ T cells | | |
| EC₅₀ [nM] of CD137 (4-1BB)- | 0.08 | 0.11 |
| upregulating on CD8+ T cells | | |

[0879] 6.5 Activation Assay of CMV-NLV-Specific CD8⁺ T Cells in the Presence of FAP-Expressing Cells

[0880] 6.5.1 Isolation and Culture of NLV-Antigen-Specific CD8 T Cells

[0881] Fresh blood was obtained from a HLA-A2⁺ CMV-infected volunteer. PBMCs were isolated by Ficoll density centrifugation and CD8⁺ T cells were purified from PBMCs using a negative selection human CD8 T cell isolation Kit according to manufacturer's recommendations (Miltenyi Biotec, Cat. No. 130-094-156). Ten million of isolated CD8 T cells were resuspended in 1 mL sterile DPBS supplemented with 1% (v/v) FBS along with 50 μL of PE-labeled HLA-A2-pentamer containing the CMV-derived NLVPMVATV peptide (Prolmmune, Cat. No. F008-2B) and incubated for 10 min at room temperature. Cells were washed twice with 3 mL sterile DPBS supplied with 1% (v/v) FBS. Cells were resuspended in 1 mL cells DPBS supplied with 1% (v/v) FBS containing 1 μg/mL anti-human CD8-FITC (clone LT8, Abcam, Cat. No. Ab28010) and incubated for 30 minutes at 4° C. Cells were washed twice, resupended to a concentration of 5×10⁶ cells/mL in DPBS supplied with 1% (v/v) FBS, and filtrated through a 30 μm pre-separation nylon-net cell strainer (Miltnyi Biotec, Cat. No. 130-041-407). NLV-peptide-specific CD8⁺ T cells were isolated by FACS sorting using an ARIA cell sorter (BD Bioscience with DIVA software) with the following settings: 100 μm nozzle and purity sort mask. Sorted cells were collected in a 15 ml polypropylene centrifuge tube (TPP, Cat. No. 91015) containing 5 ml RPMI 1640 medium supplied with 10% (v/v) FBS, 1% (v/v) GlutaMAX-I and 400 U/mL Proleukin. Sorted cells were centrifuged for 7 minutes at 350×g at room temperature and resuspended in same medium to a concentration of 0.53×10⁶ cells/mL. 100 μL/well of this cell suspension were added to each well of a previously prepared feeder plate. PHA-L-activated irradiated allogeneic feeder cells were prepared from PBMCs as previously described (Levitsky et al., 1998) and distributed to 96 well culture plates at 2×10⁵ feeder cells per well. After one day of culturing 100 μL medium/well were removed from well containing sorted CD8⁺ T-cells and replaced by new RPMI 1640 medium supplemented with 10% (v/v) FBS and 1% (v/v) GlutaMAX-I and 400 U/mL Proleukin, this was repeated during culture on a regular basis (every 2-4 days). As soon as cells start to proliferate, they were transferred to 24-well flat-bottom tissue culture plate (TPP, 92024). Cells were expanded/split and reactivated with new feeder cell preparation on a regular basis.

[0882] 6.5.2 Activation Assay of NLV-Antigen-Specific CD8+ T Cells

[0883] MV-3 cells (already described in Example 6.2) were harvested and resuspended to 1×10⁶ cells/mL in T cell medium consisting of RPMI 1640 medium supplemented with 10% (v/v) FBS, 1% (v/v) GlutaMAX I, 1 mM Sodium-Pyruvate, 1% (v/v) MEM non-essential amino acids and 50 μM β-Mercaptoethanol and separated into three tubes. Synthetic NLVPMVATV peptide (obtained from thinkpeptides) was added to a final concentration of 1×10⁻⁹ M or 1×10⁻⁸ M and cells were incubated for 90 min. NLV-peptide pulsed MV-3 cells were washed once with T cell medium and resuspended to a density of 0.5×10⁶ cells/mL, distributed (100 μL/well) to a 96-well round bottom cell-suspension plate (Greiner bio-one, cellstar, Cat. No. 650185) and incubated over night at 37° C. and 5% CO₂. The next day, FAP-targeted 4-1BB ligand trimer-containing Fc fusion antigen binding molecule (construct 2.11 and as controls construct 2.4 and control F and D) were added in 50 μL of T-cell medium at a range of final concentrations (from 10 to 0.0004 nM). NLV-specific CD8 T cells were harvested, washed and added in 50 μL medium to each well (final tumor: CD8 T cell ratio 0.125). The principle of the assay is shown in FIG. 14.

[0884] Cells were incubated for 24 h and 50 μL/well were replaced with T cell medium containing 2.64 μL/mL Golgi stop (Protein Transport Inhibitor containing Monesin, BD Bioscience, Cat.-No. 554724, end concentration 0.66 μl/mL) and 4 μL/mL Golgi plug (Protein Transporter Inhibitor containing Brefeldin A, BD Bioscience, Cat.-No. 555029, end concentration 1 μg/mL) were added to each well.

[0885] Cells were incubated for 4 h and then plates were washed with 200 μL/well DPBS and stained with 100 μL 4° C. DPBS containing 1:1000 diluted LIVE/DEATH Fixable Aqua Dead Cell Stain (Molecular Probes, Cat.-No. L34957) for 30 minutes at 4° C. Cell were washed with 200 μL DPBS and stained in 50 μL/well FACS buffer (DPBS containing 2% FBS, 5 mM EDTA, 7.5 mM Sodium-Azide) containing 1 μg/mL anti-human CD137-PerCP-Cy5.5 (BioLegend, clone 4B4-1, Cat.-No. 309814), 0.67 μg/mL anti-human CD8-APC-Cy7 (BioLegend, clone RPA-T8, Cat.-No. 301016) and 0.67 μg/mL anti-human PD-1-PE-Cy7 (BioLegend, clone EH12.2H7, Cat.-No. 329918) for 30 min at 4° C. Cells were washed twice with 200 μL/well DBPS, resuspended in 50 uL freshly prepared Perm/Fix-buffer (eBioscience Cat.-No. 00-5123-43 and Cat.-No. 00-5223-56) and incubated for 30 min at 4° C. Cells were washed twice with 200 uL DPBS and resuspended in 50 uL freshly prepared Perm buffer (eBioscience Cat.-No. 00-8333-56) containing 6 ng/mL anti-human Eomes-eF660 (eBioscience, clone WD1928, Cat.-No. 50-4877-42), anti-human IFNγ-BV421 (BioLegend, clone 4S.B3, Cat.-No. 502532) and 4 μL/mL anti-human Granzyme B-PE (BD, clone GB11, Cat.-No. 561142). Cells were incubated for 1 h at 4° C. and washed twice with 200 uL/well DPBS. For fixation, 50 μL/well DPBS containing 1% Formaldehyde were added and incubated for 15 min. Cells were resuspended in 100 μL/well FACS buffer and acquired using MACS Quant Analyzer 10 (Miltenyi Biotech). Data was analyzed with FlowJo v10.0.7 and Graph Pad Prism 6.04.

[0886] As shown in FIG. 15, only the FAP (4B9)-targeted split trimeric 4-1BBL fusion molecules construct 2.11 and the positive control construct 2.4 induced a concentration-dependent increase of expressed 4-1BB (CD137) (FIG. 15A) and IFNγ (FIG. 15B) on NLV-specific CD8⁺ T cells. The negative control molecules control F and D did not induce this up-regulation of activation markers. The EC₅₀ values of 4-1BB and IFNγ up-regulation on NLV-specific CD8⁺ T cells are shown in Table 57.

TABLE 57
EC50 values of induced upregulation of activation markers 4-1BB
(CD137) and IFNγ on NLV-activated CD8+ T cells.

| | | Construct | Construct |
|---|---|---|---|
| TCR stimulus | parameter | 2.4 | 2.11 |
| 10−9M peptide | EC₅₀ [nM] on CD137⁺ CD8 | 0.023 | 0.006 |
| 10−8M peptide | EC₅₀ [nM] on CD137⁺ CD8 | 0.017 | 0.006 |
| 10−8M peptide | EC₅₀ [nM] on IFNγ⁺ CD8 | 0.021 | 0.011 |

### Example 7

### Functional Characterization of Monovalent CD19-Targeted C-Terminal 4-1BB Split Trimeric Ligand Fc Fusion Antigen Binding Molecules 7.1 Binding on Activated Human PBMCs

[0887] To check the binding of 4-1BBL to 4-1BB expressing T cells, human PBMCs were pre-activated by TCR stimulation for the upregulation of 4-1BB on T cells for 48 hours. PBMCs were purified from buffy coat by Ficoll (GE Healthcare, Cat No. 17-1440-03) gradient centrifugification, and were then diluted into a concentration of 2.8×10⁶/ml resuspended in RPMI medium (Gibco, Cat No. 72400-054)+10% FBS (Gibco, Cat No. 20012-068) and 1% penicillin-Streptomycin (Gibco, Cat No. 15070-063) and 50 uM of 2-Mercaptoethanol (Gibco, Cat No. 31350-010). 90 ul of cells were added to each well of a round-bottom 96-well plates (greiner bio-one, cellstar, Cat. No. 650185). Then additional 50 ul anti-CD3 and anti-CD28 microbeads (Life Technologies, Cat No. 11131D) at 8×10⁵ beads/ml were added to wells. Two days later, cells were washed with cold PBS (Gibco, 20012-068) 1 time, and resuspended with 90 ul of cold PBS, and incubated with 10 ul of solution containing construct 4.11, construct 3.11, positive control construct 4.1 and negative control Control D for 1 hour at 4° C. After extensive washing, cells were further stained with 50 μL/well of cold FACS buffer containing 5 μg/mL PE-conjugated AffiniPure anti-human IgG F(ab′)2-fragment-specific goat F(ab′)2 fragment (Jackson ImmunoResearch, Cat. No. 109 116 098), and additionally with anti-human CD3 (Biolegend, Cat No. 300312), CD4 (Biolegend, Cat No. 317434) and CD8 (Biolegend, Cat No. 344710) Ab for 30 minutes at 4° C. Cells were washed twice with 200 μL/well 4° C. FACS buffer and cells were fixed in 50 DPBS containing 1% Formaldehyde (Sigma, HT501320-9.5L). Cells were resuspended in 100 μL/well FACS-buffer and acquired using the FACS LSR II (BD Biosciences). Data was analyzed using FlowJo V10 (FlowJo, LLC) and GraphPad Prism 6.04 (GraphPad Software, Inc).

[0888] The specific binding was gated on pure population of CD4 and CD8 cells. All the constructs showed similar binding properties to 4-1BB expressing CD4 or CD8 T cells in a dose dependent manner (FIG. 16). In Table 58 the EC₅₀ values of the binding curves are listed.

TABLE 58
EC₅₀ values of binding curves to 4-1BB⁺ human T cells

| | Construct | Construct | Construct | Construct |
|---|---|---|---|---|
| | 4.11 | 3.11 | 4.1 | D |
| EC₅₀ [nM] on CD4 | 0.13 | 0.13 | 0.11 | 0.17 |
| EC₅₀ [μg/ml] on CD4 | 0.02 | 0.02 | 0.02 | 0.03 |
| EC₅₀ [nM] on CD8 | 0.32 | 0.38 | 0.28 | 0.23 |
| EC₅₀ [μg/ml] on CD8 | 0.05 | 0.06 | 0.05 | 0.04 |

[0889] 7.2 Binding of CD19-Expressing Tumor Cells

[0890] To check the binding to tumor antigen CD19, the CD19⁺ WSU-DLCL2 cells (DSMZ No. ACC 575) were used. 0.1×10⁶ tumor cells resuspended in DPBS (Gibco by Life Technologies, Cat. No. 14190 326) were added to each well of a round-bottom suspension cell 96-well plates (greiner bio-one, cellstar, Cat. No. 650185). Cells were washed once with 200 4 DPBS. Cells were resuspended in 100 μL/well of 4° C. cold DPBS buffer containing 1:5000 diluted Fixable Viability Dye eFluor 660 (eBioscience, Cat. No. 65-0864-18) and plates were incubated for 30 minutes at 4° C. Cells were washed once with 200 μL/well 4° C. cold DPBS buffer and resuspended in 50 μL/well of 4° C. cold FACS buffer (DPBS supplied with 2% FBS, 5 mM EDTA pH8 (Amresco, Cat. No. E177) and 7.5 mM Sodium azide (Sigma-Aldrich S2002)) containing Construct 4.11, Construct 3.11, as positive control construct 4.1 and as negative control control D at a series of concentrations, followed by incubation for 1 hour at 4° C. After extensive washing, cells were further stained with 50 μL/well of 4° C. cold FACS buffer containing 5 μg/mL PE-conjugated AffiniPure anti-human IgG F(ab′)2-fragment-specific goat F(ab′)2 fragment (Jackson ImmunoResearch, Cat. No. 109 116 098) for 30 minutes at 4° C. Cells were washed twice with 200 μL/well 4° C. FACS buffer and cells were fixed in 50 μL/well DPBS containing 1% Formaldehyde (Sigma, HT501320-9.5L). Cells were resuspended in 100 μL/well FACS-buffer and acquired using the FACS LSR II (BD Biosciences). Data was analyzed using FlowJo V10 (FlowJo, LLC) and GraphPad Prism 6.04 (GraphPad Software, Inc).

[0891] Gates were set on living tumor cells and geo means of fluorescence intensity of PE-conjugated AffiniPure anti-human IgG IgG Fcγ-fragment-specific goat F(ab′)2 fragment were plotted against the titrated concentration of CD19-targeted or untargeted C-terminal 4-1BB split trimeric ligand Fc fusion antigen binding molecules. As shown in FIG. 17, only the CD19-targeted split trimeric 4-1BB ligand fusion molecules Construct 4.11 and Construct 3.11 and Construct 4.1 bound to CD19-expressing tumor cells WSU-DLCL2, whereas the untargeted split trimeric 4-1BB ligand fusion molecule Control D did not bind to the tumor cells. In Table 59, the EC₅₀ values of the CD19⁺ tumor binding curves are listed.

TABLE 59
EC₅₀ values of binding curves to CD19⁺ tumor cells

| | Construct 4.11 | Construct 3.11 | Construct 4.1 |
|---|---|---|---|
| EC₅₀ [nM] | 0.26 | 0.38 | 0.17 |
| EC₅₀ [μg/ml] | 0.04 | 0.06 | 0.03 |

[0892] 7.3 Biological Activity: NF-κB Activation of HeLa Reporter Cells Expressing Human 4-1BB Co-Cultured with CD19-Expressing B Cells Lymphoma Cells

[0893] 7.3.1 Generation of HeLa Reporter Cells Expressing Human 4-1BB and NF-κB-Luciferase

[0894] The HeLa-human-4-1BB-NFκN-luc reporter cell line was generated as described already in Example 6.3.1.

[0895] 7.3.2 NF-κB Activation of HeLa Reporter Cells Expressing Human 4-1BB Co-Cultured with FAP-Expressing Tumor Cells

[0896] NFκB-luc-4-1BB-HeLa clone 26 cells were washed with DPBS (Gibco by Life Technologies, Cat. No. 14190 326) and treated with 0.05 Trypsin EDTA (Gibco by Life Technologies Cat. No. 25300 054) for 5 min at 37° C. Cells were harvested and resuspended in DMEM Medium (Gibco by Life Technologies Cat. No. 42430 025) supplied with 10% Fetal Calf Serum (FBS, US-origin, PAN biotech, P30-2009, Lot P150307GI, gamma irradiated mycoplasma free, heat inactivated 35 min 56° C.) and 1% GlutaMAX-I (GIBCO by Life Technologies, Cat. No. 35050 038). Cells were counted using Cell Counter Vi-cell xr 2.03 (Beckman Coulter, Cat. No. 731050) and set to a cell density of 0.2×10⁶ cells/mL. 100 μL (2×10⁴ cells) of this cell suspension were transferred to each well of a sterile white 96-well flat bottom tissue culture plate with lid (greiner bio one, Cat. No. 655083) and the plates were incubated at 37° C. and 5% CO₂ overnight. The next day 50 μL of medium containing different titrated concentrations of Construct 3.11 and Construct 4.11 were added. As positive control Constructs 3.4 and 4.1 and as negative controls Control D and Control F were added, which have been described Example 1.11. For CD19-binding-mediated crosslinking the following CD19-expressing cell lines were used: diffuse large B-cell lymphoma cell line OCI-Ly18 (DMSZ ACC 699), acute lymphoblastic leukemia (ALL) cell line Nalm6 (DSMZ ACC-128) and non-Hodgkin's B cell lymphoma (B-NHL) cell line SU-DHL-8 (DSMZ ACC-573). Therefore CD19-expressing suspension cell lines OCI-Ly18, Nalm6 and SU-DHL-8 and were harvested, counted using Cell Counter Vi-cell xr 2.03 and resuspended in DEM supplied with 10% FBS and 1% L-GlutaMAX-I to 2×10⁶ cells/mL and 50 μL were added/well. After adding crosslinking CD19-expressing tumor cells lines plates were incubated for 6 hours at 37° C. and 5% CO₂. White flat bottom 96-well plates were washed three times with 200 μL/well DPBS. 40 μ1 fresh prepared Reporter Lysis Buffer (Promega, Cat-No: E3971) were added to each well and the plate were stored over night at −20° C. The next day frozen plates and detection buffer (Luciferase 1000 Assay System, Promega, Cat. No. E4550) were thawed to room temperature. 100 uL of detection buffer were added to each well and plates were measured as fast as possible using the SpectraMax M5/M5e microplate reader and SoftMax Pro Software (Molecular Devices) with following settings: for luciferase (RLUs), 500 ms integration time, no filter, collecting all wave length and top reading. The setup of the assay is shown in FIG. 18 and the activities as measured for Constructs 3.4, 4.1, 3.11 and 4.11 and Controls D and F are shown in FIG. 19. In Table 60 the EC₅₀ values of the binding curves to CD19-expressing tumor cell lines are listed.

TABLE 60
EC₅₀ values of binding curves to CD19-expressing tumor cell lines

| | Construct 3.4 | Construct 3.11 | Construct 4.1 |
|---|---|---|---|
| OCI-Ly18 EC₅₀ [nM] | 0.03 | 0.03 | 0.03 |
| Nalm6 EC₅₀ [nM] | 0.03 | 0.03 | 0.02 |
| SU-DHL-8 EC₅₀ [nM] | 0.03 | 0.03 | 0.03 |

[0897] 7.4 Biological Activity: Human PBMC Activation Assay

[0898] To determine the biological activities in physiological relevant settings, we measured the release of effector function molecule IFNγ in activated human PBMCs by costimluating T cells and NK cells via 4-1BBL. PBMCs were purified from buffy coat by Ficoll (GE Healthcare, Cat No. 17-1440-03) gradient centrifugification, and were then diluted into a concentration of 2.2×10⁶/ml resuspended in RPMI medium (Gibco, Cat No. 72400-054) +10% FBS (Gibco, Cat No. 20012-068) and 1% penicillin-Streptomycin (Gibco, Cat No. 15070-063) and 50 uM of 2-Mercaptoethanol (Gibco, Cat No. 31350-010). 90 μl of cells were added to each well of round-bottom 96-well plates (greiner bio-one, cellstar, Cat. No. 650185). Then 10 μl of solution containing Construct 4.11, Construct 3.11, positive control construct 4.1 and negative control control D were added to the wells at a series of concentrations, and provided with additional 50 μl anti-CD3 and anti-CD28 microbeads (Life Technologies, Cat No. 11131D) at 8×10⁵ beads/ml. After 48 hour incubation, the supernatant were collected for the measurement of IFN-γ by ELISA (DuoSet Human IFNg ELISA kit, R&D Systems, Cat No. DY285).

[0899] FIG. 20 shows that Construct 4.11, Construct 3.11 and the positive control Construct 4.1 stimulated PBMCs to produce a similar amount of IFNγ, whereas the negative control D did not activate T or NK cells due to the lack of cross-linking. In Table 61 the EC₅₀ values of the IFNγ curves on activated human PBMCs are listed.

TABLE 61
EC₅₀ values of of the IFNγ curves on activated human PBMCs

| | Construct 4.11 | Construct 3.11 | Construct 4.1 |
|---|---|---|---|
| EC₅₀ [nM] | 0.19 | 0.13 | 0.06 |
| EC₅₀ [μg/ml] | 0.03 | 0.02 | 0.01 |

[0900] Although the foregoing invention has been described in some detail by way of illustration and example for purposes of clarity of understanding, the descriptions and examples should not be construed as limiting the scope of the invention. The disclosures of all patent and scientific literature cited herein are expressly incorporated in their entirety by reference.

### CITATIONS

[0901] Ascierto, P. A., E. Simeone, M. Sznol, Y. X. Fu, and I. Melero (2010), Clinical experiences with anti-CD137 and anti-PD1 therapeutic antibodies. Semin Oncol 37:508-516.
[0902] Aggarwal B. B. (2003), Signalling pathways of the TNF superfamily: a double-edged sword. Nat. Rev. Immunol. 3(9),745-56.
[0903] Banner D. et al (1993), Crystal structure of the soluble human 55 kd TNF receptor-human TNF beta complex: implications for TNF receptor activation. Cell 73, 431-445.
[0904] Bodmer J., Schneider P. and Tschopp, J. (2002), The molecular architecture of the TNF superfamily. Trends in Biochemical Sciences 27(1), 19-26.
[0905] Broll, K., Richter, G., Pauly, S., Hofstaedter, F., and Schwarz, H. (2001). CD137 expression in tumor vessel walls. High correlation with malignant tumors. Am J Clin Pathol 115, 543-549.
[0906] Buechele, C., Baessler, T., Schmiedel, B. J., Schumacher, C. E., Grosse-Hovest, L., Rittig, K., and Salih, H. R. (2012). 4-1BB ligand modulates direct and Rituximab-induced NK-cell reactivity in chronic lymphocytic leukemia. Eur J Immunol 42, 737-748.
[0907] Choi, B. K., Kim, Y. H., Kwon, P. M., Lee, S. C., Kang, S. W., Kim, M. S., Lee, M. J., and Kwon, B. S. (2009). 4-1BB functions as a survival factor in dendritic cells. J Immunol 182, 4107-4115.
[0908] Cuadros, C., Dominguez, A. L., Lollini, P. L., Croft, M., Mittler, R. S., Borgstrom, P., and Lustgarten, J. (2005). Vaccination with dendritic cells pulsed with apoptotic tumors in combination with anti-OX40 and anti-4-1BB monoclonal antibodies induces T cell-mediated protective immunity in Her-2/neu transgenic mice. Int J Cancer 116, 934-943.
[0909] Curran, M. A., Kim, M., Montalvo, W., Al-Shamkhani, A., and Allison, J. P. (2011). Combination CTLA-4 blockade and 4-1BB activation enhances tumor rejection by increasing T-cell infiltration, proliferation, and cytokine production. PLoS One 6, e19499.
[0910] Diehl, L., van Mierlo, G. J., den Boer, A. T., van der Voort, E., Fransen, M., van Bostelen, L., Krimpenfort, P., Melief, C. J., Mittler, R., Toes, R. E., and Offringa, R. (2002). In vivo triggering through 4-1BB enables Th-independent priming of CTL in the presence of an intact CD28 costimulatory pathway. J Immunol 168, 3755-3762.
[0911] Dubrot, J., Milheiro, F., Alfaro, C., Palazon, A., Martinez-Forero, I., Perez-Gracia, J. L., Morales-Kastresana, A., Romero-Trevejo, J. L., Ochoa, M. C., Hervas-Stubbs, S., et al. (2010). Treatment with anti-CD137 mAbs causes intense accumulations of liver T cells without selective antitumor immunotherapeutic effects in this organ. Cancer Immunol Immunother 59, 1223-1233.
[0912] Futagawa, T., Akiba, H., Kodama, T., Takeda, K., Hosoda, Y., Yagita, H., and Okumura, K. (2002). Expression and function of 4-1BB and 4-1BB ligand on murine dendritic cells. Int Immunol 14, 275-286.
[0913] Guo, Z., Cheng, D., Xia, Z., Luan, M., Wu, L., Wang, G., and Zhang, S. (2013). Combined TIM-3 blockade and CD137 activation affords the long-term protection in a murine model of ovarian cancer. J Transl Med 11, 215.
[0914] Heinisch, I. V., Daigle, I., Knopfli, B., and Simon, H. U. (2000). CD137 activation abrogates granulocyte-macrophage colony-stimulating factor-mediated anti-apoptosis in neutrophils. Eur J Immunol 30, 3441-3446.
[0915] Hornig, N., Kermer, V., Frey, K., Diebolder, P., Kontermann, R. E., Mueller, D. (2012), Combination of a bispecific antibody and costimulatory antibody-ligand fusion proteins for targeted cancer immunotherapy. J. Immunother. 35, 418-429.
[0916] Ju, S. A., Cheon, S. H., Park, S. M., Tam, N. Q., Kim, Y. M., An, W. G., and Kim, B. S. (2008). Eradication of established renal cell carcinoma by a combination of 5-fluorouracil and anti-4-1BB monoclonal antibody in mice. Int J Cancer 122, 2784-2790.
[0917] Kienzle, G., and von Kempis, J. (2000). CD137 (ILA/4-1BB), expressed by primary human monocytes, induces monocyte activation and apoptosis of B lymphocytes. Int Immunol 12, 73-82.
[0918] Kim, D. H., Chang, W. S., Lee, Y. S., Lee, K. A., Kim, Y. K., Kwon, B. S., and Kang, C. Y. (2008). 4-1BB engagement costimulates NKT cell activation and exacerbates NKT cell ligand-induced airway hyperresponsiveness and inflammation. J Immunol 180, 2062-2068.
[0919] Kim, Y. H., Choi, B. K., Oh, H. S., Kang, W. J., Mittler, R. S., and Kwon, B. S. (2009). Mechanisms involved in synergistic anticancer effects of anti-4-1BB and cyclophosphamide therapy. Mol Cancer Ther 8, 469-478.
[0920] Kwon, B. S., and Weissman, S. M. (1989). cDNA sequences of two inducible T-cell genes. Proc Natl Acad Sci USA 86, 1963-1967.
[0921] Lee, H., Park, H. J., Sohn, H. J., Kim, J. M., and Kim, S. J. (2011). Combinatorial therapy for liver metastatic colon cancer: dendritic cell vaccine and low-dose agonistic anti-4-1BB antibody co-stimulatory signal. J Surg Res 169, e43-50.
[0922] Levitsky, V., de Campos-Lima, P. O., Frisan, T., and Masucci, M. G. (1998). The clonal composition of a peptide-specific oligoclonal CTL repertoire selected in response to persistent EBV infection is stable over time. J Immunol 161, 594-601.
[0923] Li, F., and Ravetch, J. V. (2011). Inhibitory Fcgamma receptor engagement drives adjuvant and anti-tumor activities of agonistic CD40 antibodies. Science 333, 1030-1034.
[0924] Lin, W., Voskens, C. J., Zhang, X., Schindler, D. G., Wood, A., Burch, E., Wei, Y., Chen, L., Tian, G., Tamada, K., et al. (2008). Fc-dependent expression of CD137 on human NK cells: insights into “agonistic” effects of anti-CD137 monoclonal antibodies. Blood 112, 699-707.
[0925] Melero, I., Johnston, J. V., Shufford, W. W., Mittler, R. S., and Chen, L. (1998). NK1.1 cells express 4-1BB (CDw137) costimulatory molecule and are required for tumor immunity elicited by anti-4-1BB monoclonal antibodies. Cell Immunol 190, 167-172.
[0926] Melero, I., Shuford, W. W., Newby, S. A., Aruffo, A., Ledbetter, J. A., Hellstrom, K. E., Mittler, R. S., and Chen, L. (1997). Monoclonal antibodies against the 4-1BB T-cell activation molecule eradicate established tumors. Nat Med 3, 682-685.
[0927] Merchant, A. M., Zhu, Z., Yuan, J. Q., Goddard, A., Adams, C. W., Presta, L. G., and Carter, P. (1998). An efficient route to human bispecific IgG. Nat Biotechnol 16, 677-681.
[0928] Morales-Kastresana, A., Sanmamed, M. F., Rodriguez, I., Palazon, A., Martinez-Forero, I., Labiano, S., Hervas-Stubbs, S., Sangro, B., Ochoa, C., Rouzaut, A., et al. (2013). Combined immunostimulatory monoclonal antibodies extend survival in an aggressive transgenic hepatocellular carcinoma mouse model. Clin Cancer Res 19, 6151-6162.
[0929] Mueller, D., Frey, K., Kontermann, R. E. (2008), A novel antibody-4-1BB1 fusion protein for targeted costimulation in cancer immunotherapy, J. Immunother. 31, 714-722.
[0930] Murillo, O., Dubrot, J., Palazon, A., Anna, A., Azpilikueta, A., Alfaro, C., Solano, S., Ochoa, M. C., Berasain, C., Gabari, I., et al. (2009). In vivo depletion of DC impairs the anti-tumor effect of agonistic anti-CD137 mAb. Eur J Immunol 39, 2424-2436.
[0931] Narazaki, H., Zhu, Y., Luo, L., Zhu, G., and Chen, L. (2010). CD137 agonist antibody prevents cancer recurrence: contribution of CD137 on both hematopoietic and nonhematopoietic cells. Blood 115, 1941-1948.
[0932] Nishimoto, H., Lee, S. W., Hong, H., Potter, K. G., Maeda-Yamamoto, M., Kinoshita, T., Kawakami, Y., Mittler, R. S., Kwon, B. S., Ware, C. F., et al. (2005). Costimulation of mast cells by 4-1BB, a member of the tumor necrosis factor receptor superfamily, with the high-affinity IgE receptor. Blood 106, 4241-4248.
[0933] Olofsson, P. S., Soderstrom, L. A., Wagsater, D., Sheikine, Y., Ocaya, P., Lang, F., Rabu, C., Chen, L., Rudling, M., Aukrust, P., et al. (2008). CD137 is expressed in human atherosclerosis and promotes development of plaque inflammation in hypercholesterolemic mice. Circulation 117, 1292-1301.
[0934] Palazon, A., Teijeira, A., Martinez-Forero, I., Hervas-Stubbs, S., Roncal, C., Penuelas, I., Dubrot, J., Morales-Kastresana, A., Perez-Gracia, J. L., Ochoa, M. C., et al. (2011). Agonist anti-CD137 mAb act on tumor endothelial cells to enhance recruitment of activated T lymphocytes. Cancer Res 71, 801-811.
[0935] Schwarz, H., Valbracht, J., Tuckwell, J., von Kempis, J., and Lotz, M. (1995). ILA, the human 4-1BB homologue, is inducible in lymphoid and other cell lineages. Blood 85, 1043-1052.
[0936] Shao, Z., and Schwarz, H. (2011). CD137 ligand, a member of the tumor necrosis factor family, regulates immune responses via reverse signal transduction. J Leukoc Biol 89, 21-29.
[0937] Shi, W., and Siemann, D. W. (2006). Augmented antitumor effects of radiation therapy by 4-1BB antibody (BMS-469492) treatment. Anticancer Res 26, 3445-3453.
[0938] Simeone, E., and Ascierto, P. A. (2012). Immunomodulating antibodies in the treatment of metastatic melanoma: the experience with anti-CTLA-4, anti-CD137, and anti-PD1. J Immunotoxicol 9, 241-247.
[0939] Snell, L. M., Lin, G. H., McPherson, A. J., Moraes, T. J., and Watts, T. H. (2011). T-cell intrinsic effects of GITR and 4-1BB during viral infection and cancer immunotherapy. Immunol Rev 244, 197-217.
[0940] Stagg, J., Loi, S., Divisekera, U., Ngiow, S. F., Duret, H., Yagita, H., Teng, M. W., and Smyth, M. J. (2011). Anti-ErbB-2 mAb therapy requires type I and II interferons and synergizes with anti-PD-1 or anti-CD137 mAb therapy. Proc Natl Acad Sci U S A 108, 7142-7147.
[0941] Teng, M. W., Sharkey, J., McLaughlin, N. M., Exley, M. A., and Smyth, M. J. (2009). CD1d-based combination therapy eradicates established tumors in mice. J Immunol 183, 1911-1920.
[0942] von Kempis, J., Schwarz, H., and Lotz, M. (1997). Differentiation-dependent and stimulus-specific expression of ILA, the human 4-1BB-homologue, in cells of mesenchymal origin. Osteoarthritis Cartilage 5, 394-406.
[0943] Wei, H., Zhao, L., Li, W., Fan, K., Qian, W., Hou, S., Wang, H., Dai, M., Hellstrom, I., Hellstrom, K. E., and Guo, Y. (2013). Combinatorial PD-1 blockade and CD137 activation has therapeutic efficacy in murine cancer models and synergizes with cisplatin. PLoS One 8, e84927.
[0944] Wilcox, R. A., Chapoval, A. I., Gorski, K. S., Otsuji, M., Shin, T., Flies, D. B., Tamada, K., Mittler, R. S., Tsuchiya, H., Pardoll, D. M., and Chen, L. (2002). Cutting edge: Expression of functional CD137 receptor by dendritic cells. J Immunol 168, 4262-4267.
[0945] Wilcox, R. A., Tamada, K., Flies, D. B., Zhu, G., Chapoval, A T., Blazar, B. R., Kast, W. M., and Chen, L. (2004). Ligation of CD137 receptor prevents and reverses established anergy of CD8+ cytolytic T lymphocytes in vivo. Blood 103, 177-184.
[0946] Zhang, N., Sadun, R. E., Arias, R. S., Flanagan, M. L., Sachsman, S. M., Nien, Y, Khawli, L. A., Hu, P., Epstein, A. L. (2007). Targeted and untargeted CD137L fusion proteins for the immunotherapy of experimental solid tumors. Clin. Cancer Res. 13, 2758-2767.
[0947] Zhang, X., Voskens, C. J., Sallin, M., Maniar, A., Montes, C. L., Zhang, Y., Lin, W., Li, G., Burch, E., Tan, M., et al. (2010). CD137 promotes proliferation and survival of human B cells. J Immunol 184, 787-795.

The application's sequence listing, which the Patent Office published only in electronic form, follows.

SEQUENCE LISTING (245 sequences)

SEQ ID NO: 1 - protein, 184 aa, Homo sapiens
REGPELSPDDPAGLLDLRQGMFAQLVAQNVLLIDGPLSWYSDPGLAGVSLTGGLSYKEDTKELVVAKAGVYYVFFQLELRRVVAGEGSGSVSLALHLQPLRSAAGAAALALTVDLPPASSEARNSAFGFQGRLLHLSAGQRLGVHLHTEARARHAWQLTQGATVLGLFRVTPEIPAGLPSPRSE

SEQ ID NO: 2 - protein, 170 aa, Homo sapiens
LDLRQGMFAQLVAQNVLLIDGPLSWYSDPGLAGVSLTGGLSYKEDTKELVVAKAGVYYVFFQLELRRVVAGEGSGSVSLALHLQPLRSAAGAAALALTVDLPPASSEARNSAFGFQGRLLHLSAGQRLGVHLHTEARARHAWQLTQGATVLGLFRVTPEIPAGLPSPRSE

SEQ ID NO: 3 - protein, 175 aa, Homo sapiens
DPAGLLDLRQGMFAQLVAQNVLLIDGPLSWYSDPGLAGVSLTGGLSYKEDTKELVVAKAGVYYVFFQLELRRVVAGEGSGSVSLALHLQPLRSAAGAAALALTVDLPPASSEARNSAFGFQGRLLHLSAGQRLGVHLHTEARARHAWQLTQGATVLGLFRVTPEIPAGLPSPRSE

SEQ ID NO: 4 - protein, 203 aa, Homo sapiens
PWAVSGARASPGSAASPRLREGPELSPDDPAGLLDLRQGMFAQLVAQNVLLIDGPLSWYSDPGLAGVSLTGGLSYKEDTKELVVAKAGVYYVFFQLELRRVVAGEGSGSVSLALHLQPLRSAAGAAALALTVDLPPASSEARNSAFGFQGRLLHLSAGQRLGVHLHTEARARHAWQLTQGATVLGLFRVTPEIPAGLPSPRSE

SEQ ID NO: 5 - protein, 178 aa, Homo sapiens
REGPELSPDDPAGLLDLRQGMFAQLVAQNVLLIDGPLSWYSDPGLAGVSLTGGLSYKEDTKELVVAKAGVYYVFFQLELRRVVAGEGSGSVSLALHLQPLRSAAGAAALALTVDLPPASSEARNSAFGFQGRLLHLSAGQRLGVHLHTEARARHAWQLTQGATVLGLFRVTPEIPAGL

SEQ ID NO: 6 - protein, 164 aa, Homo sapiens
LDLRQGMFAQLVAQNVLLIDGPLSWYSDPGLAGVSLTGGLSYKEDTKELVVAKAGVYYVFFQLELRRVVAGEGSGSVSLALHLQPLRSAAGAAALALTVDLPPASSEARNSAFGFQGRLLHLSAGQRLGVHLHTEARARHAWQLTQGATVLGLFRVTPEIPAGL

SEQ ID NO: 7 - protein, 169 aa, Homo sapiens
DPAGLLDLRQGMFAQLVAQNVLLIDGPLSWYSDPGLAGVSLTGGLSYKEDTKELVVAKAGVYYVFFQLELRRVVAGEGSGSVSLALHLQPLRSAAGAAALALTVDLPPASSEARNSAFGFQGRLLHLSAGQRLGVHLHTEARARHAWQLTQGATVLGLFRVTPEIPAGL

SEQ ID NO: 8 - protein, 197 aa, Homo sapiens
PWAVSGARASPGSAASPRLREGPELSPDDPAGLLDLRQGMFAQLVAQNVLLIDGPLSWYSDPGLAGVSLTGGLSYKEDTKELVVAKAGVYYVFFQLELRRVVAGEGSGSVSLALHLQPLRSAAGAAALALTVDLPPASSEARNSAFGFQGRLLHLSAGQRLGVHLHTEARARHAWQLTQGATVLGLFRVTPEIPAGL

SEQ ID NO: 9 - protein, 378 aa, Artificial Sequence
  Description of Artificial Sequence: Synthetic polypeptide
  dimeric hu 4-1BBL (71-254) connected by (G4S)2 linker
REGPELSPDDPAGLLDLRQGMFAQLVAQNVLLIDGPLSWYSDPGLAGVSLTGGLSYKEDTKELVVAKAGVYYVFFQLELRRVVAGEGSGSVSLALHLQPLRSAAGAAALALTVDLPPASSEARNSAFGFQGRLLHLSAGQRLGVHLHTEARARHAWQLTQGATVLGLFRVTPEIPAGLPSPRSEGGGGSGGGGSREGPELSPDDPAGLLDLRQGMFAQLVAQNVLLIDGPLSWYSDPGLAGVSLTGGLSYKEDTKELVVAKAGVYYVFFQLELRRVVAGEGSGSVSLALHLQPLRSAAGAAALALTVDLPPASSEARNSAFGFQGRLLHLSAGQRLGVHLHTEARARHAWQLTQGATVLGLFRVTPEIPAGLPSPRSE

SEQ ID NO: 10 - protein, 366 aa, Artificial Sequence
  Description of Artificial Sequence: Synthetic polypeptide
  dimeric hu 4-1BBL (71-248) connected by (G4S)2 linker
REGPELSPDDPAGLLDLRQGMFAQLVAQNVLLIDGPLSWYSDPGLAGVSLTGGLSYKEDTKELVVAKAGVYYVFFQLELRRVVAGEGSGSVSLALHLQPLRSAAGAAALALTVDLPPASSEARNSAFGFQGRLLHLSAGQRLGVHLHTEARARHAWQLTQGATVLGLFRVTPEIPAGLGGGGSGGGGSREGPELSPDDPAGLLDLRQGMFAQLVAQNVLLIDGPLSWYSDPGLAGVSLTGGLSYKEDTKELVVAKAGVYYVFFQLELRRVVAGEGSGSVSLALHLQPLRSAAGAAALALTVDLPPASSEARNSAFGFQGRLLHLSAGQRLGVHLHTEARARHAWQLTQGATVLGLFRVTPEIPAGL

SEQ ID NO: 11 - protein, 133 aa, Homo sapiens
QVSHRYPRIQSIKVQFTEYKKEKGFILTSQKEDEIMKVQNNSVIINCDGFYLISLKGYFSQEVNISLHYQKDEEPLFQLKKVRSVNSLMVASLTYKDKVYLNVTTDNTSLDDFHVNGGELILIHQNPGEFCVL

SEQ ID NO: 12 - protein, 132 aa, Homo sapiens
VSHRYPRIQSIKVQFTEYKKEKGFILTSQKEDEIMKVQNNSVIINCDGFYLISLKGYFSQEVNISLHYQKDEEPLFQLKKVRSVNSLMVASLTYKDKVYLNVTTDNTSLDDFHVNGGELILIHQNPGEFCVL

SEQ ID NO: 13 - protein, 5 aa, Artificial Sequence
  Description of Artificial Sequence: Synthetic peptide
  FAP(28H1)  CDR-H1
SHAMS

SEQ ID NO: 14 - protein, 16 aa, Artificial Sequence
  Description of Artificial Sequence: Synthetic peptide
  FAP(28H1)  CDR-H2
AIWASGEQYYADSVKG

SEQ ID NO: 15 - protein, 8 aa, Artificial Sequence
  Description of Artificial Sequence: Synthetic peptide
  FAP(28H1)  CDR-H3
GWLGNFDY

SEQ ID NO: 16 - protein, 12 aa, Artificial Sequence
  Description of Artificial Sequence: Synthetic peptide
  FAP(28H1)  CDR-L1
RASQSVSRSYLA

SEQ ID NO: 17 - protein, 7 aa, Artificial Sequence
  Description of Artificial Sequence: Synthetic peptide
  FAP(28H1)  CDR-L2
GASTRAT

SEQ ID NO: 18 - protein, 9 aa, Artificial Sequence
  Description of Artificial Sequence: Synthetic peptide
  FAP(28H1)  CDR-L3
QQGQVIPPT

SEQ ID NO: 19 - protein, 5 aa, Artificial Sequence
  Description of Artificial Sequence: Synthetic peptide
  FAP(4B9)  CDR-H1
SYAMS

SEQ ID NO: 20 - protein, 17 aa, Artificial Sequence
  Description of Artificial Sequence: Synthetic peptide
  FAP(4B9)  CDR-H2
AIIGSGASTYYADSVKG

SEQ ID NO: 21 - protein, 8 aa, Artificial Sequence
  Description of Artificial Sequence: Synthetic peptide
  FAP(4B9)  CDR-H3
GWFGGFNY

SEQ ID NO: 22 - protein, 12 aa, Artificial Sequence
  Description of Artificial Sequence: Synthetic peptide
  FAP(4B9)  CDR-L1
RASQSVTSSYLA

SEQ ID NO: 23 - protein, 7 aa, Artificial Sequence
  Description of Artificial Sequence: Synthetic peptide
  FAP(4B9)  CDR-L2
VGSRRAT

SEQ ID NO: 24 - protein, 9 aa, Artificial Sequence
  Description of Artificial Sequence: Synthetic peptide
  FAP(4B9)  CDR-L3
QQGIMLPPT

SEQ ID NO: 25 - protein, 116 aa, Artificial Sequence
  Description of Artificial Sequence: Synthetic polypeptide
  FAP(28H1) VH
EVQLLESGGGLVQPGGSLRLSCAASGFTFSSHAMSWVRQAPGKGLEWVSAIWASGEQYYADSVKGRFTISRDNSKNTLYLQMNSLRAEDTAVYYCAKGWLGNFDYWGQGTLVTVSS

SEQ ID NO: 26 - protein, 108 aa, Artificial Sequence
  Description of Artificial Sequence: Synthetic polypeptide
  FAP(28H1) VL
EIVLTQSPGTLSLSPGERATLSCRASQSVSRSYLAWYQQKPGQAPRLLIIGASTRATGIPDRFSGSGSGTDFTLTISRLEPEDFAVYYCQQGQVIPPTFGQGTKVEIK

SEQ ID NO: 27 - protein, 117 aa, Artificial Sequence
  Description of Artificial Sequence: Synthetic polypeptide
  FAP(4B9)  VH
EVQLLESGGGLVQPGGSLRLSCAASGFTFSSYAMSWVRQAPGKGLEWVSAIIGSGASTYYADSVKGRFTISRDNSKNTLYLQMNSLRAEDTAVYYCAKGWFGGFNYWGQGTLVTVSS

SEQ ID NO: 28 - protein, 108 aa, Artificial Sequence
  Description of Artificial Sequence: Synthetic polypeptide
  FAP(4B9)  VL
EIVLTQSPGTLSLSPGERATLSCRASQSVTSSYLAWYQQKPGQAPRLLINVGSRRATGIPDRFSGSGSGTDFTLTISRLEPEDFAVYYCQQGIMLPPTFGQGTKVEIK

SEQ ID NO: 29 - protein, 5 aa, Artificial Sequence
  Description of Artificial Sequence: Synthetic peptide
  CD19 (8B8-018) CDR-H1
DYIMH

SEQ ID NO: 30 - protein, 17 aa, Artificial Sequence
  Description of Artificial Sequence: Synthetic peptide
  CD19 (8B8-018) CDR-H2
YINPYNDGSKYTEKFQG

SEQ ID NO: 31 - protein, 12 aa, Artificial Sequence
  Description of Artificial Sequence: Synthetic peptide
  CD19 (8B8-018) CDR-H3
GTYYYGSALFDY

SEQ ID NO: 32 - protein, 16 aa, Artificial Sequence
  Description of Artificial Sequence: Synthetic peptide
  CD19 (8B8-018) CDR-L1
KSSQSLENPNGNTYLN

SEQ ID NO: 33 - protein, 7 aa, Artificial Sequence
  Description of Artificial Sequence: Synthetic peptide
  CD19 (8B8-018) CDR-L2
RVSKRFS

SEQ ID NO: 34 - protein, 9 aa, Artificial Sequence
  Description of Artificial Sequence: Synthetic peptide
  CD19 (8B8-018) CDR-L3
LQLTHVPYT

SEQ ID NO: 35 - protein, 5 aa, Artificial Sequence
  Description of Artificial Sequence: Synthetic peptide
  CD19 (8B8-2B11) CDR-H1
DYIMH

SEQ ID NO: 36 - protein, 17 aa, Artificial Sequence
  Description of Artificial Sequence: Synthetic peptide
  CD19 (8B8-2B11) CDR-H2
YINPYNDGSKYTEKFQG

SEQ ID NO: 37 - protein, 12 aa, Artificial Sequence
  Description of Artificial Sequence: Synthetic peptide
  CD19 (8B8-2B11) CDR-H3
GTYYYGPQLFDY

SEQ ID NO: 38 - protein, 16 aa, Artificial Sequence
  Description of Artificial Sequence: Synthetic peptide
  CD19 (8B8-2B11) CDR-L1
KSSQSLETSTGTTYLN

SEQ ID NO: 39 - protein, 7 aa, Artificial Sequence
  Description of Artificial Sequence: Synthetic peptide
  CD19 (8B8-2B11) CDR-L2
RVSKRFS

SEQ ID NO: 40 - protein, 9 aa, Artificial Sequence
  Description of Artificial Sequence: Synthetic peptide
  CD19 (8B8-2B11) CDR-L3
LQLLEDPYT

SEQ ID NO: 41 - protein, 121 aa, Artificial Sequence
  Description of Artificial Sequence: Synthetic polypeptide
  CD19 (8B8-018) VH
QVQLVQSGAEVKKPGASVKVSCKASGYTFTDYIMHWVRQAPGQGLEWMGYINPYNDGSKYTEKFQGRVTMTSDTSISTAYMELSRLRSDDTAVYYCARGTYYYGSALFDYWGQGTTVTVSS

SEQ ID NO: 42 - protein, 112 aa, Artificial Sequence
  Description of Artificial Sequence: Synthetic polypeptide
  CD19 (8B8-018) VL
DIVMTQTPLSLSVTPGQPASISCKSSQSLENPNGNTYLNWYLQKPGQSPQLLIYRVSKRFSGVPDRFSGSGSGTDFTLKISRVEAEDVGVYYCLQLTHVPYTFGQGTKLEIK

SEQ ID NO: 43 - protein, 121 aa, Artificial Sequence
  Description of Artificial Sequence: Synthetic polypeptide
  CD19 (8B8-2B11) VH
QVQLVQSGAEVKKPGASVKVSCKASGYTFTDYIMHWVRQAPGQGLEWMGYINPYNDGSKYTEKFQGRVTMTSDTSISTAYMELSRLRSDDTAVYYCARGTYYYGPQLFDYWGQGTTVTVSS

SEQ ID NO: 44 - protein, 112 aa, Artificial Sequence
  Description of Artificial Sequence: Synthetic polypeptide
  CD19 (8B8-2B11) VL
DIVMTQTPLSLSVTPGQPASISCKSSQSLETSTGTTYLNWYLQKPGQSPQLLIYRVSKRFSGVPDRFSGSGSGTDFTLKISRVEAEDVGVYYCLQLLEDPYTFGQGTKLEIK

SEQ ID NO: 45 - protein, 5 aa, Artificial Sequence
  Description of Artificial Sequence: Synthetic peptide
  CEA CDR-H1
DTYMH

SEQ ID NO: 46 - protein, 17 aa, Artificial Sequence
  Description of Artificial Sequence: Synthetic peptide
  CEA CDR-H2
RIDPANGNSKYVPKFQG

SEQ ID NO: 47 - protein, 12 aa, Artificial Sequence
  Description of Artificial Sequence: Synthetic peptide
  CEA CDR-H3
FGYYVSDYAMAY

SEQ ID NO: 48 - protein, 15 aa, Artificial Sequence
  Description of Artificial Sequence: Synthetic peptide
  CEA CDR-L1
RAGESVDIFGVGFLH

SEQ ID NO: 49 - protein, 7 aa, Artificial Sequence
  Description of Artificial Sequence: Synthetic peptide
  CEA CDR-L2
RASNRAT

SEQ ID NO: 50 - protein, 9 aa, Artificial Sequence
  Description of Artificial Sequence: Synthetic peptide
  CEA CDR-L3
QQTNEDPYT

SEQ ID NO: 51 - protein, 121 aa, Artificial Sequence
  Description of Artificial Sequence: Synthetic polypeptide
  Humanized CEA binder VH
QVQLVQSGAEVKKPGSSVKVSCKASGFNIKDTYMHWVRQAPGQGLEWMGRIDPANGNSKYVPKFQGRVTITADTSTSTAYMELSSLRSEDTAVYYCAPFGYYVSDYAMAYWGQGTLVTVSS

SEQ ID NO: 52 - protein, 111 aa, Artificial Sequence
  Description of Artificial Sequence: Synthetic polypeptide
  Humanized CEA binder VL
EIVLTQSPATLSLSPGERATLSCRAGESVDIFGVGFLHWYQQKPGQAPRLLIYRASNRATGIPARFSGSGSGTDFTLTISSLEPEDFAVYYCQQTNEDPYTFGQGTKLEIK

SEQ ID NO: 53 - protein, 760 aa, Homo sapiens
MKTWVKIVFGVATSAVLALLVMCIVLRPSRVHNSEENTMRALTLKDILNGTFSYKTFFPNWISGQEYLHQSADNNIVLYNIETGQSYTILSNRTMKSVNASNYGLSPDRQFVYLESDYSKLWRYSYTATYYIYDLSNGEFVRGNELPRPIQYLCWSPVGSKLAYVYQNNIYLKQRPGDPPFQITFNGRENKIFNGIPDWVYEEEMLATKYALWWSPNGKFLAYAEFNDTDIPVIAYSYYGDEQYPRTINIPYPKAGAKNPVVRIFIIDTTYPAYVGPQEVPVPAMIASSDYYFSWLTWVTDERVCLQWLKRVQNVSVLSICDFREDWQTWDCPKTQEHIEESRTGWAGGFFVSTPVFSYDAISYYKIFSDKDGYKHIHYIKDTVENAIQITSGKWEAINIFRVTQDSLFYSSNEFEEYPGRRNIYRISIGSYPPSKKCVTCHLRKERCQYYTASFSDYAKYYALVCYGPGIPISTLHDGRTDQEIKILEENKELENALKNIQLPKEEIKKLEVDEITLWYKMILPPQFDRSKKYPLLIQVYGGPCSQSVRSVFAVNWISYLASKEGMVIALVDGRGTAFQGDKLLYAVYRKLGVYEVEDQITAVRKFIEMGFIDEKRIAIWGWSYGGYVSSLALASGTGLFKCGIAVAPVSSWEYYASVYTERFMGLPTKDDNLEHYKNSTVMARAEYFRNVDYLLIHGTADDNVHFQNSAQIAKALVNAQVDFQAMWYSDQNHGLSGLSTNHLYTHMTHFLKQCFSLSD

SEQ ID NO: 54 - protein, 748 aa, Artificial Sequence
  Description of Artificial Sequence: Synthetic polypeptide
  hu FAP ectodomain+poly-lys-tag+his6-tag
RPSRVHNSEENTMRALTLKDILNGTFSYKTFFPNWISGQEYLHQSADNNIVLYNIETGQSYTILSNRTMKSVNASNYGLSPDRQFVYLESDYSKLWRYSYTATYYIYDLSNGEFVRGNELPRPIQYLCWSPVGSKLAYVYQNNIYLKQRPGDPPFQITFNGRENKIFNGIPDWVYEEEMLATKYALWWSPNGKFLAYAEFNDTDIPVIAYSYYGDEQYPRTINIPYPKAGAKNPVVRIFIIDTTYPAYVGPQEVPVPAMIASSDYYFSWLTWVTDERVCLQWLKRVQNVSVLSICDFREDWQTWDCPKTQEHIEESRTGWAGGFFVSTPVFSYDAISYYKIFSDKDGYKHIHYIKDTVENAIQITSGKWEAINIFRVTQDSLFYSSNEFEEYPGRRNIYRISIGSYPPSKKCVTCHLRKERCQYYTASFSDYAKYYALVCYGPGIPISTLHDGRTDQEIKILEENKELENALKNIQLPKEEIKKLEVDEITLWYKMILPPQFDRSKKYPLLIQVYGGPCSQSVRSVFAVNWISYLASKEGMVIALVDGRGTAFQGDKLLYAVYRKLGVYEVEDQITAVRKFIEMGFIDEKRIAIWGWSYGGYVSSLALASGTGLFKCGIAVAPVSSWEYYASVYTERFMGLPTKDDNLEHYKNSTVMARAEYFRNVDYLLIHGTADDNVHFQNSAQIAKALVNAQVDFQAMWYSDQNHGLSGLSTNHLYTHMTHFLKQCFSLSDGKKKKKKGHHHHHH

SEQ ID NO: 55 - DNA, 2244 bp, Artificial Sequence
  Description of Artificial Sequence: Synthetic polynucleotide
  nucleotide sequence of hu FAP ectodomain+poly-lys-tag+his6-tag
cgcccttcaagagttcataactctgaagaaaatacaatgagagcactcacactgaaggatattttaaatggaacattttcttataaaacattttttccaaactggatttcaggacaagaatatcttcatcaatctgcagataacaatatagtactttataatattgaaacaggacaatcatataccattttgagtaatagaaccatgaaaagtgtgaatgcttcaaattacggcttatcacctgatcggcaatttgtatatctagaaagtgattattcaaagctttggagatactcttacacagcaacatattacatctatgaccttagcaatggagaatttgtaagaggaaatgagcttcctcgtccaattcagtatttatgctggtcgcctgttgggagtaaattagcatatgtctatcaaaacaatatctatttgaaacaaagaccaggagatccaccttttcaaataacatttaatggaagagaaaataaaatatttaatggaatcccagactgggtttatgaagaggaaatgcttgctacaaaatatgctctctggtggtctcctaatggaaaatttttggcatatgcggaatttaatgatacggatataccagttattgcctattcctattatggcgatgaacaatatcctagaacaataaatattccatacccaaaggctggagctaagaatcccgttgttcggatatttattatcgataccacttaccctgcgtatgtaggtccccaggaagtgcctgttccagcaatgatagcctcaagtgattattatttcagttggctcacgtgggttactgatgaacgagtatgtttgcagtggctaaaaagagtccagaatgtttcggtcctgtctatatgtgacttcagggaagactggcagacatgggattgtccaaagacccaggagcatatagaagaaagcagaactggatgggctggtggattctttgtttcaacaccagttttcagctatgatgccatttcgtactacaaaatatttagtgacaaggatggctacaaacatattcactatatcaaagacactgtggaaaatgctattcaaattacaagtggcaagtgggaggccataaatatattcagagtaacacaggattcactgttttattctagcaatgaatttgaagaataccctggaagaagaaacatctacagaattagcattggaagctatcctccaagcaagaagtgtgttacttgccatctaaggaaagaaaggtgccaatattacacagcaagtttcagcgactacgccaagtactatgcacttgtctgctacggcccaggcatccccatttccacccttcatgatggacgcactgatcaagaaattaaaatcctggaagaaaacaaggaattggaaaatgctttgaaaaatatccagctgcctaaagaggaaattaagaaacttgaagtagatgaaattactttatggtacaagatgattcttcctcctcaatttgacagatcaaagaagtatcccttgctaattcaagtgtatggtggtccctgcagtcagagtgtaaggtctgtatttgctgttaattggatatcttatcttgcaagtaaggaagggatggtcattgccttggtggatggtcgaggaacagctttccaaggtgacaaactcctctatgcagtgtatcgaaagctgggtgtttatgaagttgaagaccagattacagctgtcagaaaattcatagaaatgggtttcattgatgaaaaaagaatagccatatggggctggtcctatggaggatacgtttcatcactggcccttgcatctggaactggtcttttcaaatgtggtatagcagtggctccagtctccagctgggaatattacgcgtctgtctacacagagagattcatgggtctcccaacaaaggatgataatcttgagcactataagaattcaactgtgatggcaagagcagaatatttcagaaatgtagactatcttctcatccacggaacagcagatgataatgtgcactttcaaaactcagcacagattgctaaagctctggttaatgcacaagtggatttccaggcaatgtggtactctgaccagaaccacggcttatccggcctgtccacgaaccacttatacacccacatgacccacttcctaaagcagtgtttctctttgtcagacggcaaaaagaaaaagaaaaagggccaccaccatcaccatcac

SEQ ID NO: 56 - protein, 761 aa, Mus musculus
MKTWLKTVFGVTTLAALALVVICIVLRPSRVYKPEGNTKRALTLKDILNGTFSYKTYFPNWISEQEYLHQSEDDNIVFYNIETRESYIILSNSTMKSVNATDYGLSPDRQFVYLESDYSKLWRYSYTATYYIYDLQNGEFVRGYELPRPIQYLCWSPVGSKLAYVYQNNIYLKQRPGDPPFQITYTGRENRIFNGIPDWVYEEEMLATKYALWWSPDGKFLAYVEFNDSDIPIIAYSYYGDGQYPRTINIPYPKAGAKNPVVRVFIVDTTYPHHVGPMEVPVPEMIASSDYYFSWLTWVSSERVCLQWLKRVQNVSVLSICDFREDWHAWECPKNQEHVEESRTGWAGGFFVSTPAFSQDATSYYKIFSDKDGYKHIHYIKDTVENAIQITSGKWEAIYIFRVTQDSLFYSSNEFEGYPGRRNIYRISIGNSPPSKKCVTCHLRKERCQYYTASFSYKAKYYALVCYGPGLPISTLHDGRTDQEIQVLEENKELENSLRNIQLPKVEIKKLKDGGLTFWYKMILPPQFDRSKKYPLLIQVYGGPCSQSVKSVFAVNWITYLASKEGIVIALVDGRGTAFQGDKFLHAVYRKLGVYEVEDQLTAVRKFIEMGFIDEERIAIWGWSYGGYVSSLALASGTGLFKCGIAVAPVSSWEYYASIYSERFMGLPTKDDNLEHYKNSTVMARAEYFRNVDYLLIHGTADDNVHFQNSAQIAKALVNAQVDFQAMWYSDQNHGISSGRSQNHLYTHMTHFLKQCFSLSD

SEQ ID NO: 57 - protein, 749 aa, Artificial Sequence
  Description of Artificial Sequence: Synthetic polypeptide
  Murine FAP ectodomain+poly-lys-tag+his6-tag
RPSRVYKPEGNTKRALTLKDILNGTFSYKTYFPNWISEQEYLHQSEDDNIVFYNIETRESYIILSNSTMKSVNATDYGLSPDRQFVYLESDYSKLWRYSYTATYYIYDLQNGEFVRGYELPRPIQYLCWSPVGSKLAYVYQNNIYLKQRPGDPPFQITYTGRENRIFNGIPDWVYEEEMLATKYALWWSPDGKFLAYVEFNDSDIPIIAYSYYGDGQYPRTINIPYPKAGAKNPVVRVFIVDTTYPHHVGPMEVPVPEMIASSDYYFSWLTWVSSERVCLQWLKRVQNVSVLSICDFREDWHAWECPKNQEHVEESRTGWAGGFFVSTPAFSQDATSYYKIFSDKDGYKHIHYIKDTVENAIQITSGKWEAIYIFRVTQDSLFYSSNEFEGYPGRRNIYRISIGNSPPSKKCVTCHLRKERCQYYTASFSYKAKYYALVCYGPGLPISTLHDGRTDQEIQVLEENKELENSLRNIQLPKVEIKKLKDGGLTFWYKMILPPQFDRSKKYPLLIQVYGGPCSQSVKSVFAVNWITYLASKEGIVIALVDGRGTAFQGDKFLHAVYRKLGVYEVEDQLTAVRKFIEMGFIDEERIAIWGWSYGGYVSSLALASGTGLFKCGIAVAPVSSWEYYASIYSERFMGLPTKDDNLEHYKNSTVMARAEYFRNVDYLLIHGTADDNVHFQNSAQIAKALVNAQVDFQAMWYSDQNHGILSGRSQNHLYTHMTHFLKQCFSLSDGKKKKKKGHHHHHH

SEQ ID NO: 58 - DNA, 2247 bp, Artificial Sequence
  Description of Artificial Sequence: Synthetic polynucleotide
  nucleotide sequence of murine FAP ectodomain+poly-lys-tag+his6-tag
cgtccctcaagagtttacaaacctgaaggaaacacaaagagagctcttaccttgaaggatattttaaatggaacattctcatataaaacatattttcccaactggatttcagaacaagaatatcttcatcaatctgaggatgataacatagtattttataatattgaaacaagagaatcatatatcattttgagtaatagcaccatgaaaagtgtgaatgctacagattatggtttgtcacctgatcggcaatttgtgtatctagaaagtgattattcaaagctctggcgatattcatacacagcgacatactacatctacgaccttcagaatggggaatttgtaagaggatacgagctccctcgtccaattcagtatctatgctggtcgcctgttgggagtaaattagcatatgtatatcaaaacaatatttatttgaaacaaagaccaggagatccaccttttcaaataacttatactggaagagaaaatagaatatttaatggaataccagactgggtttatgaagaggaaatgcttgccacaaaatatgctctttggtggtctccagatggaaaatttttggcatatgtagaatttaatgattcagatataccaattattgcctattcttattatggtgatggacagtatcctagaactataaatattccatatccaaaggctggggctaagaatccggttgttcgtgtttttattgttgacaccacctaccctcaccacgtgggcccaatggaagtgccagttccagaaatgatagcctcaagtgactattatttcagctggctcacatgggtgtccagtgaacgagtatgcttgcagtggctaaaaagagtgcagaatgtctcagtcctgtctatatgtgatttcagggaagactggcatgcatgggaatgtccaaagaaccaggagcatgtagaagaaagcagaacaggatgggctggtggattctttgtttcgacaccagcttttagccaggatgccacttcttactacaaaatatttagcgacaaggatggttacaaacatattcactacatcaaagacactgtggaaaatgctattcaaattacaagtggcaagtgggaggccatatatatattccgcgtaacacaggattcactgttttattctagcaatgaatttgaaggttaccctggaagaagaaacatctacagaattagcattggaaactctcctccgagcaagaagtgtgttacttgccatctaaggaaagaaaggtgccaatattacacagcaagtttcagctacaaagccaagtactatgcactcgtctgctatggccctggcctccccatttccaccctccatgatggccgcacagaccaagaaatacaagtattagaagaaaacaaagaactggaaaattctctgagaaatatccagctgcctaaagtggagattaagaagctcaaagacgggggactgactttctggtacaagatgattctgcctcctcagtttgacagatcaaagaagtaccctttgctaattcaagtgtatggtggtccttgtagccagagtgttaagtctgtgtttgctgttaattggataacttatctcgcaagtaaggaggggatagtcattgccctggtagatggtcggggcactgctttccaaggtgacaaattcctgcatgccgtgtatcgaaaactgggtgtatatgaagttgaggaccagctcacagctgtcagaaaattcatagaaatgggtttcattgatgaagaaagaatagccatatggggctggtcctacggaggttatgtttcatccctggcccttgcatctggaactggtcttttcaaatgtggcatagcagtggctccagtctccagctgggaatattacgcatctatctactcagagagattcatgggcctcccaacaaaggacgacaatctcgaacactataaaaattcaactgtgatggcaagagcagaatatttcagaaatgtagactatcttctcatccacggaacagcagatgataatgtgcactttcagaactcagcacagattgctaaagctttggttaatgcacaagtggatttccaggcgatgtggtactctgaccagaaccatggtatattatctgggcgctcccagaatcatttatatacccacatgacgcacttcctcaagcaatgcttttctttatcagacggcaaaaagaaaaagaaaaagggccaccaccatcaccatcac

SEQ ID NO: 59 - protein, 748 aa, Artificial Sequence
  Description of Artificial Sequence: Synthetic polypeptide
  Cynomolgus FAP ectodomain+poly-lys-tag+his6-tag
RPPRVHNSEENTMRALTLKDILNGTFSYKTFFPNWISGQEYLHQSADNNIVLYNIETGQSYTILSNRTMKSVNASNYGLSPDRQFVYLESDYSKLWRYSYTATYYIYDLSNGEFVRGNELPRPIQYLCWSPVGSKLAYVYQNNIYLKQRPGDPPFQITFNGRENKIFNGIPDWVYEEEMLATKYALWWSPNGKFLAYAEFNDTDIPVIAYSYYGDEQYPRTINIPYPKAGAKNPFVRIFIIDTTYPAYVGPQEVPVPAMIASSDYYFSWLTWVTDERVCLQWLKRVQNVSVLSICDFREDWQTWDCPKTQEHIEESRTGWAGGFFVSTPVFSYDAISYYKIFSDKDGYKHIHYIKDTVENAIQITSGKWEAINIFRVTQDSLFYSSNEFEDYPGRRNIYRISIGSYPPSKKCVTCHLRKERCQYYTASFSDYAKYYALVCYGPGIPISTLHDGRTDQEIKILEENKELENALKNIQLPKEEIKKLEVDEITLWYKMILPPQFDRSKKYPLLIQVYGGPCSQSVRSVFAVNWISYLASKEGMVIALVDGRGTAFQGDKLLYAVYRKLGVYEVEDQITAVRKFIEMGFIDEKRIAIWGWSYGGYVSSLALASGTGLFKCGIAVAPVSSWEYYASVYTERFMGLPTKDDNLEHYKNSTVMARAEYFRNVDYLLIHGTADDNVHFQNSAQIAKALVNAQVDFQAMWYSDQNHGLSGLSTNHLYTHMTHFLKQCFSLSDGKKKKKKGHHHHHH

SEQ ID NO: 60 - DNA, 2244 bp, Artificial Sequence
  Description of Artificial Sequence: Synthetic polynucleotide
  nucleotide sequence of cynomolgus FAP ectodomain +poly-lys-tag+his6-tag
cgccctccaagagttcataactctgaagaaaatacaatgagagcactcacactgaaggatattttaaatgggacattttcttataaaacattttttccaaactggatttcaggacaagaatatcttcatcaatctgcagataacaatatagtactttataatattgaaacaggacaatcatataccattttgagtaacagaaccatgaaaagtgtgaatgcttcaaattatggcttatcacctgatcggcaatttgtatatctagaaagtgattattcaaagctttggagatactcttacacagcaacatattacatctatgaccttagcaatggagaatttgtaagaggaaatgagcttcctcgtccaattcagtatttatgctggtcgcctgttgggagtaaattagcatatgtctatcaaaacaatatctatttgaaacaaagaccaggagatccaccttttcaaataacatttaatggaagagaaaataaaatatttaatggaatcccagactgggtttatgaagaggaaatgcttgctacaaaatatgctctctggtggtctcctaatggaaaatttttggcatatgcggaatttaatgatacagatataccagttattgcctattcctattatggcgatgaacaatatcccagaacaataaatattccatacccaaaggccggagctaagaatccttttgttcggatatttattatcgataccacttaccctgcgtatgtaggtccccaggaagtgcctgttccagcaatgatagcctcaagtgattattatttcagttggctcacgtgggttactgatgaacgagtatgtttgcagtggctaaaaagagtccagaatgtttcggtcttgtctatatgtgatttcagggaagactggcagacatgggattgtccaaagacccaggagcatatagaagaaagcagaactggatgggctggtggattctttgtttcaacaccagttttcagctatgatgccatttcatactacaaaatatttagtgacaaggatggctacaaacatattcactatatcaaagacactgtggaaaatgctattcaaattacaagtggcaagtgggaggccataaatatattcagagtaacacaggattcactgttttattctagcaatgaatttgaagattaccctggaagaagaaacatctacagaattagcattggaagctatcctccaagcaagaagtgtgttacttgccatctaaggaaagaaaggtgccaatattacacagcaagtttcagcgactacgccaagtactatgcacttgtctgctatggcccaggcatccccatttccacccttcatgacggacgcactgatcaagaaattaaaatcctggaagaaaacaaggaattggaaaatgctttgaaaaatatccagctgcctaaagaggaaattaagaaacttgaagtagatgaaattactttatggtacaagatgattcttcctcctcaatttgacagatcaaagaagtatcccttgctaattcaagtgtatggtggtccctgcagtcagagtgtaaggtctgtatttgctgttaattggatatcttatcttgcaagtaaggaagggatggtcattgccttggtggatggtcggggaacagctttccaaggtgacaaactcctgtatgcagtgtatcgaaagctgggtgtttatgaagttgaagaccagattacagctgtcagaaaattcatagaaatgggtttcattgatgaaaaaagaatagccatatggggctggtcctatggaggatatgtttcatcactggcccttgcatctggaactggtcttttcaaatgtgggatagcagtggctccagtctccagctgggaatattacgcgtctgtctacacagagagattcatgggtctcccaacaaaggatgataatcttgagcactataagaattcaactgtgatggcaagagcagaatatttcagaaatgtagactatcttctcatccacggaacagcagatgataatgtgcactttcaaaactcagcacagattgctaaagctctggttaatgcacaagtggatttccaggcaatgtggtactctgaccagaaccacggcttatccggcctgtccacgaaccacttatacacccacatgacccacttcctaaagcagtgtttctctttgtcagacggcaaaaagaaaaagaaaaagggccaccaccatcaccatcac

SEQ ID NO: 61 - protein, 702 aa, Homo sapiens
MESPSAPPHRWCIPWQRLLLTASLLTFWNPPTTAKLTIESTPFNVAEGKEVLLLVHNLPQHLFGYSWYKGERVDGNRQIIGYVIGTQQATPGPAYSGREIIYPNASLLIQNIIQNDTGFYTLHVIKSDLVNEEATGQFRVYPELPKPSISSNNSKPVEDKDAVAFTCEPETQDATYLWWVNNQSLPVSPRLQLSNGNRTLTLFNVTRNDTASYKCETQNPVSARRSDSVILNVLYGPDAPTISPLNTSYRSGENLNLSCHAASNPPAQYSWFVNGTFQQSTQELFIPNITVNNSGSYTCQAHNSDTGLNRTTVTTITVYAEPPKPFITSNNSNPVEDEDAVALTCEPEIQNTTYLWWVNNQSLPVSPRLQLSNDNRTLTLLSVTRNDVGPYECGIQNKLSVDHSDPVILNVLYGPDDPTISPSYTYYRPGVNLSLSCHAASNPPAQYSWLIDGNIQQHTQELFISNITEKNSGLYTCQANNSASGHSRTTVKTITVSAELPKPSISSNNSKPVEDKDAVAFTCEPEAQNTTYLWWVNGQSLPVSPRLQLSNGNRTLTLFNVTRNDARAYVCGIQNSVSANRSDPVTLDVLYGPDTPIISPPDSSYLSGANLNLSCHSASNPSPQYSWRINGIPQQHTQVLFIAKITPNNNGTYACFVSNLATGRNNSIVKSITVSASGTSPGLSAGATVGIMIGVLVGVALI

SEQ ID NO: 62 - protein, 2322 aa, Homo sapiens
MQSGPRPPLPAPGLALALTLTMLARLASAASFFGENHLEVPVATALTDIDLQLQFSTSQPEALLLLAAGPADHLLLQLYSGRLQVRLVLGQEELRLQTPAETLLSDSIPHTVVLTVVEGWATLSVDGFLNASSAVPGAPLEVPYGLFVGGTGTLGLPYLRGTSRPLRGCLHAATLNGRSLLRPLTPDVHEGCAEEFSASDDVALGFSGPHSLAAFPAWGTQDEGTLEFTLTTQSRQAPLAFQAGGRRGDFIYVDIFEGHLRAVVEKGQGTVLLHNSVPVADGQPHEVSVHINAHRLEISVDQYPTHTSNRGVLSYLEPRGSLLLGGLDAEASRHLQEHRLGLTPEATNASLLGCMEDLSVNGQRRGLREALLTRNMAAGCRLEEEEYEDDAYGHYEAFSTLAPEAWPAMELPEPCVPEPGLPPVFANFTQLLTISPLVVAEGGTAWLEWRHVQPTLDLMEAELRKSQVLFSVTRGARHGELELDIPGAQARKMFTLLDVVNRKARFIHDGSEDTSDQLVLEVSVTARVPMPSCLRRGQTYLLPIQVNPVNDPPHIIFPHGSLMVILEHTQKPLGPEVFQAYDPDSACEGLTFQVLGTSSGLPVERRDQPGEPATEFSCRELEAGSLVYVHRGGPAQDLTFRVSDGLQASPPATLKVVAIRPAIQIHRSTGLRLAQGSAMPILPANLSVETNAVGQDVSVLFRVTGALQFGELQKQGAGGVEGAEWWATQAFHQRDVEQGRVRYLSTDPQHHAYDTVENLALEVQVGQEILSNLSFPVTIQRATVWMLRLEPLHTQNTQQETLTTAHLEATLEEAGPSPPTFHYEVVQAPRKGNLQLQGTRLSDGQGFTQDDIQAGRVTYGATARASEAVEDTFRFRVTAPPYFSPLYTFPIHIGGDPDAPVLTNVLLVVPEGGEGVLSADHLFVKSLNSASYLYEVMERPRHGRLAWRGTQDKTTMVTSFTNEDLLRGRLVYQHDDSETTEDDIPFVATRQGESSGDMAWEEVRGVFRVAIQPVNDHAPVQTISRIFHVARGGRRLLTTDDVAFSDADSGFADAQLVLTRKDLLFGSIVAVDEPTRPIYRFTQEDLRKRRVLFVHSGADRGWIQLQVSDGQHQATALLEVQASEPYLRVANGSSLVVPQGGQGTIDTAVLHLDTNLDIRSGDEVHYHVTAGPRWGQLVRAGQPATAFSQQDLLDGAVLYSHNGSLSPRDTMAFSVEAGPVHTDATLQVTIALEGPLAPLKLVRHKKIYVFQGEAAEIRRDQLEAAQEAVPPADIVFSVKSPPSAGYLVMVSRGALADEPPSLDPVQSFSQEAVDTGRVLYLHSRPEAWSDAFSLDVASGLGAPLEGVLVELEVLPAAIPLEAQNFSVPEGGSLTLAPPLLRVSGPYFPTLLGLSLQVLEPPQHGALQKEDGPQARTLSAFSWRMVEEQLIRYVHDGSETLTDSFVLMANASEMDRQSHPVAFTVTVLPVNDQPPILTTNTGLQMWEGATAPIPAEALRSTDGDSGSEDLVYTIEQPSNGRVVLRGAPGTEVRSFTQAQLDGGLVLFSHRGTLDGGFRFRLSDGEHTSPGHFFRVTAQKQVLLSLKGSQTLTVCPGSVQPLSSQTLRASSSAGTDPQLLLYRVVRGPQLGRLFHAQQDSTGEALVNFTQAEVYAGNILYEHEMPPEPFWEAHDTLELQLSSPPARDVAATLAVAVSFEAACPQRPSHLWKNKGLWVPEGQRARITVAALDASNLLASVPSPQRSEHDVLFQVTQFPSRGQLLVSEEPLHAGQPHFLQSQLAAGQLVYAHGGGGTQQDGFHFRAHLQGPAGASVAGPQTSEAFAITVRDVNERPPQPQASVPLRLTRGSRAPISRAQLSVVDPDSAPGEIEYEVQRAPHNGFLSLVGGGLGPVTRFTQADVDSGRLAFVANGSSVAGIFQLSMSDGASPPLPMSLAVDILPSAIEVQLRAPLEVPQALGRSSLSQQQLRVVSDREEPEAAYRLIQGPQYGHLLVGGRPTSAFSQFQIDQGEVVFAFTNFSSSHDHFRVLALARGVNASAVVNVTVRALLHVWAGGPWPQGATLRLDPTVLDAGELANRTGSVPRFRLLEGPRHGRVVRVPRARTEPGGSQLVEQFTQQDLEDGRLGLEVGRPEGRAPGPAGDSLTLELWAQGVPPAVASLDFATEPYNAARPYSVALLSVPEAARTEAGKPESSTPTGEPGPMASSPEPAVAKGGFLSFLEANMFSVIIPMCLVLLLLALILPLLFYLRKRNKTGKHDVQVLTAKPRNGLAGDTETFRKVEPGQAIPLTAVPGQGPPPGGQPDPELLQFCRTPNPALKNGQYWV

SEQ ID NO: 63 - protein, 1209 aa, Homo sapiens
RPSGTAGAALLALLAALCPASRALEEKKVCQGTSNKLTQLGTFEDHFLSLQRMFNNCEVVLGNLEITYVQRNYDLSFLKTIQEVAGYVLIALNTVERIPLENLQIIRGNMYYENSYALAVLSNYDANKTGLKELPMRNLQEILHGAVRFSNNPALCNVESIQWRDIVSSDFLSNMSMDFQNHLGSCQKCDPSCPNGSCWGAGEENCQKLTKIICAQQCSGRCRGKSPSDCCHNQCAAGCTGPRESDCLVCRKFRDEATCKDTCPPLMLYNPTTYQMDVNPEGKYSFGATCVKKCPRNYVVTDHGSCVRACGADSYEMEEDGVRKCKKCEGPCRKVCNGIGIGEFKDSLSINATNIKHFKNCTSISGDLHILPVAFRGDSFTHTPPLDPQELDILKTVKEITGFLLIQAWPENRTDLHAFENLEIIRGRTKQHGQFSLAVVSLNITSLGLRSLKEISDGDVIISGNKNLCYANTINWKKLFGTSGQKTKIISNRGENSCKATGQVCHALCSPEGCWGPEPRDCVSCRNVSRGRECVDKCNLLEGEPREFVENSECIQCHPECLPQAMNITCTGRGPDNCIQCAHYIDGPHCVKTCPAGVMGENNTLVWKYADAGHVCHLCHPNCTYGCTGPGLEGCPTNGPKIPSIATGMVGALLLLLVVALGIGLFMRRRHIVRKRTLRRLLQERELVEPLTPSGEAPNQALLRILKETEFKKIKVLGSGAFGTVYKGLWIPEGEKVKIPVAIKELREATSPKANKEILDEAYVMASVDNPHVCRLLGICLTSTVQLITQLMPFGCLLDYVREHKDNIGSQYLLNWCVQIAKGMNYLEDRRLVHRDLAARNVLVKTPQHVKITDFGLAKLLGAEEKEYHAEGGKVPIKWMALESILHRIYTHQSDVWSYGVTVWELMTFGSKPYDGIPASEISSILEKGERLPQPPICTIDVYMIMVKCWMIDADSRPKFRELIIEFSKMARDPQRYLVIQGDERMHLPSPTDSNFYRALMDEEDMDDVVDADEYLIPQQGFFSSPSTSRTPLLSSLSATSNNSTVACIDRNGLQSCPIKEDSFLQRYSSDPTGALTEDSIDDTFLPVPEYINQSVPKRPAGSVQNPVYHNQPLNPAPSRDPHYQDPHSTAVGNPEYLNTVQPTCVNSTFDSPAHWAQKGSHQISLDNPDYQQDFFPKEAKPNGIFKGSTAENAEYLRVAPQSSEFIGA

SEQ ID NO: 64 - protein, 556 aa, Homo sapiens [sequence omitted]

SEQ ID NO: 65 - protein, 297 aa, Homo sapiens
MTTPRNSVNGTFPAEPMKGPIAMQSGPKPLFRRMSSLVGPTQSFFMRESKTLGAVQIMNGLFHIALGGLLMIPAGIYAPICVTVWYPLWGGIMYIISGSLLAATEKNSRKCLVKGKMIMNSLSLFAAISGMILSIMDILNIKISHFLKMESLNFIRAHTPYINIYNCEPANPSEKNSPSTQYCYSIQSLFLGILSVMLIFAFFQELVIAGIVENEWKRTCSRPKSNIVLLSAEEKKEQTIEIKEEVVGLTETSSQPKNEEDIEIIPIQEEEEEETETNFPEPPQDQESSPIENDSSP

SEQ ID NO: 66 - protein, 364 aa, Homo sapiens
MPLLLLLPLLWAGALAMDPNFWLQVQESVTVQEGLCVLVPCTFFHPIPYYDKNSPVHGYWFREGAIISRDSPVATNKLDQEVQEETQGRFRLLGDPSRNNCSLSIVDARRRDNGSYFFRMERGSTKYSYKSPQLSVHVTDLTHRPKILIPGTLEPGHSKNLTCSVSWACEQGTPPIFSWLSAAPTSLGPRTTHSSVLIITPRPQDHGTNLTCQVKFAGAGVTTERTIQLNVTYVPQNPTTGIFPGDGSGKQETRAGVVHGAIGGAGVTALLALCLCLIFFIVKTHRRKAARTAVGRNDTHPTTGSASPKHQKKSKLHGPTETSSCSGAAPTVEMDEELHYASLNFHGMNPSKDTSTEYSEVRTQ

SEQ ID NO: 67 - protein, 205 aa, Homo sapiens
MTPPERLFLPRVCGTTLHLLLLGLLLVLLPGAQGLPGVGLTPSAAQTARQHPKMHLAHSTLKPAAHLIGDPSKQNSLLWRANTDRAFLQDGFSLSNNSLLVPTSGIYFVYSQVVFSGKAYSPKATSSPLYLAHEVQLFSSQYPFHVPLLSSQKMVYPGLQEPWLHSMYHGAAFQLTQGDQLSTHTDGIPHLVLSPSTVFFGAFAL

SEQ ID NO: 68 - protein, 233 aa, Homo sapiens
MSTESMIRDVELAEEALPKKTGGPQGSRRCLFLSLFSFLIVAGATTLFCLLHFGVIGPQREEFPRDLSLISPLAQAVRSSSRTPSDKPVAHVVANPQAEGQLQWLNRRANALLANGVELRDNQLVVPSEGLYLIYSQVLFKGQGCPSTHVLLTHTISRIAVSYQTKVNLLSAIKSPCQRETPEGAEAKPWYEPIYLGGVFQLEKGDRLSAEINRPDYLDFAESGQVYFGIIAL

SEQ ID NO: 69 - protein, 244 aa, Homo sapiens
MGALGLEGRGGRLQGRGSLLLAVAGATSLVTLLLAVPITVLAVLALVPQDQGGLVTETADPGAQAQQGLGFQKLPEEEPETDLSPGLPAAHLIGAPLKGQGLGWETTKEQAFLTSGTQFSDAEGLALPQDGLYYLYCLVGYRGRAPPGGGDPQGRSVTLRSSLYRAGGAYGPGTPELLLEGAETVTPVLDPARRQGYGPLWYTSVGFGGLVQLRRGERVYVNISHPDMVDFARGKTFFGAVMVG

SEQ ID NO: 70 - protein, 183 aa, Homo sapiens
MERVQPLEENVGNAARPRFERNKLLLVASVIQGLGLLLCFTYICLHFSALQVSHRYPRIQSIKVQFTEYKKEKGFILTSQKEDEIMKVQNNSVIINCDGFYLISLKGYFSQEVNISLHYQKDEEPLFQLKKVRSVNSLMVASLTYKDKVYLNVTTDNTSLDDFHVNGGELILIHQNPGEFCVL

SEQ ID NO: 71 - protein, 261 aa, Homo sapiens
MIETYNQTSPRSAATGLPISMKIFMYLLTVFLITQMIGSALFAVYLHRRLDKIEDERNLHEDFVFMKTIQRCNTGERSLSLLNCEEIKSQFEGFVKDIMLNKEETKKENSFEMQKGDQNPQIAAHVISEASSKTTSVLQWAEKGYYTMSNNLVTLENGKQLTVKRQGLYYIYAQVTFCSNREASSQAPFIASLCLKSPGRFERILLRAANTHSSAKPCGQQSIHLGGVFELQPGASVFVNVTDPSQVSHGTGFTSFGLLKL

SEQ ID NO: 72 - protein, 281 aa, Homo sapiens
MQQPFNYPYPQIYWVDSSASSPWAPPGTVLPCPTSVPRRPGQRRPPPPPPPPPLPPPPPPPPLPPLPLPPLKKRGNHSTGLCLLVMFFMVLVALVGLGLGMFQLFHLQKELAELRESTSQMHTASSLEKQIGHPSPPPEKKELRKVAHLTGKSNSRSMPLEWEDTYGIVLLSGVKYKKGGLVINETGLYFVYSKVYFRGQSCNNLPLSHKVYMRNSKYPQDLVMMEGKMMSYCTTGQMWARSSYLGAVFNLTSADHLYVNVSELSLVNFEESQTFFGLYKL

SEQ ID NO: 73 - protein, 193 aa, Homo sapiens
MPEEGSGCSVRRRPYGCVLRAALVPLVAGLVICLVVCIQRFAQAQQQLPLESLGWDVAELQLNHTGPQQDPRLYWQGGPALGRSFLHGPELDKGQLRIHRDGIYMVHIQVTLAICSSTTASRHHPTTLAVGICSPASRSISLLRLSFHQGCTIASQRLTPLARGDTLCTNLTGTLLPSRNTDETFFGVQWVRP

SEQ ID NO: 74 - protein, 234 aa, Homo sapiens
MDPGLQQALNGMAPPGDTAMHVPAGSVASHLGTTSRSYFYLTTATLALCLVFTVATIMVLVVQRTDSIPNSPDNVPLKGGNCSEDLLCILKRAPFKKSWAYLQVAKHLNKTKLSWNKDGILHGVRYQDGNLVIQFPGLYFIICQLQFLVQCPNNSVDLKLELLINKHIKKQALVTVCESGMQTKHVYQNLSQFLLDYLQVNTTISVNVDTFQYIDTSTFPLENVLSIFLYSNSD

SEQ ID NO: 75 - protein, 254 aa, Homo sapiens
MEYASDASLDPEAPWPPAPRARACRVLPWALVAGLLLLLLLAAACAVFLACPWAVSGARASPGSAASPRLREGPELSPDDPAGLLDLRQGMFAQLVAQNVLLIDGPLSWYSDPGLAGVSLTGGLSYKEDTKELVVAKAGVYYVFFQLELRRVVAGEGSGSVSLALHLQPLRSAAGAAALALTVDLPPASSEARNSAFGFQGRLLHLSAGQRLGVHLHTEARARHAWQLTQGATVLGLFRVTPEIPAGLPSPRSE

SEQ ID NO: 76 - protein, 281 aa, Homo sapiens [sequence omitted]

SEQ ID NO: 77 - protein, 317 aa, Homo sapiens
MRRASRDYTKYLRGSEEMGGGPGAPHEGPLHAPPPPAPHQPPAASRSMFVALLGLGLGQVVCSVALFFYFRAQMDPNRISEDGTHCIYRILRLHENADFQDTTLESQDTKLIPDSCRRIKQAFQGAVQKELQHIVGSQHIRAEKAMVDGSWLDLAKRSKLEAQPFAHLTINATDIPSGSHKVSLSSWYHDRGWAKISNMTFSNGKLIVNQDGFYYLYANICFRHHETSGDLATEYLQLMVYVTKTSIKIPSSHTLMKGGSTKYWSGNSEFHFYSINVGGFFKLRSGEEISIEVSNPSLLDPDQDATYFGAFKVRDID

SEQ ID NO: 78 - protein, 249 aa, Homo sapiens
MAARRSQRRRGRRGEPGTALLVPLALGLGLALACLGLLLAVVSLGSRASLSAQEPAQEELVAEEDQDPSELNPQTEESQDPAPFLNRLVRPRRSAPKGRKTRARRAIAAHYEVHPRPGQDGAQAGVDGTVSGWEEARINSSSPLRYNRQIGEFIVTRAGLYYLYCQVHFDEGKAVYLKLDLLVDGVLALRCLEEFSATAASSLGPQLRLCQVSGLLALRPGSSLRIRTLPWAHLKAAPFLTYFGLFQVH

SEQ ID NO: 79 - protein, 250 aa, Homo sapiens [sequence omitted]

SEQ ID NO: 80 - protein, 285 aa, Homo sapiens
MDDSTEREQSRLTSCLKKREEMKLKECVSILPRKESPSVRSSKDGKLLAATLLLALLSCCLTVVSFYQVAALQGDLASLRAELQGHHAEKLPAGAGAPKAGLEEAPAVTAGLKIFEPPAPGEGNSSQNSRNKRAVQGPEETVTQDCLQLIADSETPTIQKGSYTFVPWLLSFKRGSALEEKENKILVKETGYFFIYGQVLYTDKTYAMGHLIQRKKVHVFGDELSLVTLFRCIQNMPETLPNNSCYSAGIAKLEEGDELQLAIPRENAQISLDGDVTFFGALKLL

SEQ ID NO: 81 - protein, 240 aa, Homo sapiens
MEESVVRPSVFVVDGQTDIPFTRLGRSHRRQSCSVARVGLGLLLLLMGAGLAVQGWFLLQLHWRLGEMVTRLPDGPAGSWEQLIQERRSHEVNPAAHLTGANSSLTGSGGPLLWETQLGLAFLRGLSYHDGALVVTKAGYYYIYSKVQLGGVGCPLGLASTITHGLYKRTPRYPEELELLVSQQSPCGRATSSSRVWWDSSFLGGVVHLEAGEKVVVRVLDERLVRLRDGTRSYFGAFMV

SEQ ID NO: 82 - protein, 251 aa, Homo sapiens
MAEDLGLSFGETASVEMLPEHGSCRPKARSSSARWALTCCLVLLPFLAGLTTYLLVSQLRAQGEACVQFQALKGQEFAPSHQQVYAPLRADGDKPRAHLTVVRQTPTQHFKNQFPALHWEHELGLAFTKNRMNYTNKFLLIPESGDYFIYSQVTFRGMTSECSEIRQAGRPNKPDSITVVITKVTDSYPEPTQLLMGTKSVCEVGSNWFQPIYLGAMFSLQEGDKLMVNVSDISLVDYTKEDKTFFGAFLL

SEQ ID NO: 83 - protein, 199 aa, Homo sapiens
MTLHPSPITCEFLFSTALISPKMCLSHLENMPLSHSRTQGAQRSSWKLWLFCSIVMLLFLCSFSWLIFIFLQLETAKEPCMAKFGPLPSKWQMASSEPPCVNKVSDWKLEILQNGLYLIYGQVAPNANYNDVAPFEVRLYKNKDMIQTLTNKSKIQNVGGTYELHVGDTIDLIFNSEHQVLKNNTYWGIILLANPQFIS

SEQ ID NO: 84 - protein, 391 aa, Homo sapiens
MGYPEVERRELLPAAAPRERGSQGCGCGGAPARAGEGNSCLLFLGFFGLSLALHLLTLCCYLELRSELRRERGAESRLGGSGTPGTSGTLSSLGGLDPDSPITSHLGQPSPKQQPLEPGEAALHSDSQDGHQMALLNFFFPDEKPYSEEESRRVRRNKRSKSNEGADGPVKNKKKGKKAGPPGPNGPPGPPGPPGPQGPPGIPGIPGIPGTTVMGPPGPPGPPGPQGPPGLQGPSGAADKAGTRENQPAVVHLQGQGSAIQVKNDLSGGVLNDWSRITMNPKVFKLHPRSGELEVLVDGTYFIYSQVEVYYINFTDFASYEVVVDEKPFLQCTRSIETGKTNYNTCYTAGVCLLKARQKIAVKMVHADISINMSKHTTFFGAIRLGEAPAS

SEQ ID NO: 85 - protein, 205 aa, Homo sapiens
ACPWAVSGARASPGSAASPRLREGPELSPDDPAGLLDLRQGMFAQLVAQNVLLIDGPLSWYSDPGLAGVSLTGGLSYKEDTKELVVAKAGVYYVFFQLELRRVVAGEGSGSVSLALHLQPLRSAAGAAALALTVDLPPASSEARNSAFGFQGRLLHLSAGQRLGVHLHTEARARHAWQLTQGATVLGLFRVTPEIPAGLPSPRSE

SEQ ID NO: 86 - protein, 5 aa, Artificial Sequence
  Description of Artificial Sequence: Synthetic peptide
  Peptide linker G4S
GGGGS

SEQ ID NO: 87 - protein, 10 aa, Artificial Sequence
  Description of Artificial Sequence: Synthetic peptide
  Peptide linker (G4S)2
GGGGSGGGGS

SEQ ID NO: 88 - protein, 10 aa, Artificial Sequence
  Description of Artificial Sequence: Synthetic peptide
  Peptide linker (SG4)2
SGGGGSGGGG

SEQ ID NO: 89 - protein, 15 aa, Artificial Sequence
  Description of Artificial Sequence: Synthetic peptide
  Peptide linker (G4S)3
GGGGSGGGGSGGGGS

SEQ ID NO: 90 - protein, 14 aa, Artificial Sequence
  Description of Artificial Sequence: Synthetic peptide
  Peptide linker G4(SG4)2
GGGGSGGGGSGGGG

SEQ ID NO: 91 - protein, 20 aa, Artificial Sequence
  Description of Artificial Sequence: Synthetic peptide
  Peptide linker (G4S)4
GGGGSGGGGSGGGGSGGGGS

SEQ ID NO: 92 - protein, 10 aa, Artificial Sequence
  Description of Artificial Sequence: Synthetic peptide
  Peptide linker GSPGSSSSGS
GSPGSSSSGS

SEQ ID NO: 93 - protein, 8 aa, Artificial Sequence
  Description of Artificial Sequence: Synthetic peptide
  Peptide linker GSGSGSGS
GSGSGSGS

SEQ ID NO: 94 - protein, 8 aa, Artificial Sequence
  Description of Artificial Sequence: Synthetic peptide
  Peptide linker GSGSGNGS
GSGSGNGS

SEQ ID NO: 95 - protein, 8 aa, Artificial Sequence
  Description of Artificial Sequence: Synthetic peptide
  Peptide linker GGSGSGSG
GGSGSGSG

SEQ ID NO: 96 - protein, 6 aa, Artificial Sequence
  Description of Artificial Sequence: Synthetic peptide
  Peptide linker GGSGSG
GGSGSG

SEQ ID NO: 97 - protein, 4 aa, Artificial Sequence
  Description of Artificial Sequence: Synthetic peptide
  Peptide linker GGSG
GGSG

SEQ ID NO: 98 - protein, 8 aa, Artificial Sequence
  Description of Artificial Sequence: Synthetic peptide
  GGSGNGSG
GGSGNGSG

SEQ ID NO: 99 - protein, 8 aa, Artificial Sequence
  Description of Artificial Sequence: Synthetic peptide
  Peptide inker GGNGSGSG
GGNGSGSG

SEQ ID NO: 100 - protein, 6 aa, Artificial Sequence
  Description of Artificial Sequence: Synthetic peptide
  Peptide linker GGNGSG
GGNGSG

SEQ ID NO: 101 - DNA, 1806 bp, Artificial Sequence
  Description of Artificial Sequence: Synthetic polynucleotide
  nucleotide sequence of Fc hole dimeric 4-1BB ligand (71-248) chain
gacaaaactcacacatgcccaccgtgcccagcacctgaagctgcagggggaccgtcagtcttcctcttccccccaaaacccaaggacaccctcatgatctcccggacccctgaggtcacatgcgtggtggtggacgtgagccacgaagaccctgaggtcaagttcaactggtacgtggacggcgtggaggtgcataatgccaagacaaagccgcgggaggagcagtacaacagcacgtaccgtgtggtcagcgtcctcaccgtcctgcaccaggactggctgaatggcaaggagtacaagtgcaaggtctccaacaaagccctcggcgcccccatcgagaaaaccatctccaaagccaaagggcagccccgagaaccacaggtgtgcaccctgcccccatcccgggatgagctgaccaagaaccaggtcagcctctcgtgcgcagtcaaaggcttctatcccagcgacatcgccgtggagtgggagagcaatgggcagccggagaacaactacaagaccacgcctcccgtgctggactccgacggctccttcttcctcgtgagcaagctcaccgtggacaagagcaggtggcagcaggggaacgtcttctcatgctccgtgatgcatgaggctctgcacaaccactacacgcagaagagcctctccctgtctccgggtggaggcggcggaagcggaggaggaggatccagagagggccctgagctgagccctgatgatcctgccggactgctggacctgcggcagggaatgtttgcccagctggtggcccagaacgtgctgctgatcgatggccccctgtcctggtacagcgatcctggactggctggcgtgtcactgacaggcggcctgagctacaaagaggacaccaaagaactggtggtggccaaggccggcgtgtactacgtgttctttcagctggaactgcggagagtggtggccggcgaaggatctggctctgtgtctctggccctgcatctgcagcctctgagatctgctgctggcgccgctgctctggcactgacagtggatctgcctcctgccagcagcgaggcccggaatagcgcatttgggtttcaaggcaggctgctgcacctgtctgccggccagaggctgggagtgcatctgcacacagaggccagggctagacacgcctggcagctgacacagggcgctacagtgctgggcctgttcagagtgacccccgagattccagcaggcctgggaggcggcggatctggcggcggaggatctagagaaggacccgagctgtcccccgacgatcccgctgggctgctggatctgagacagggcatgttcgctcagctggtggctcagaatgtgctgctgattgacggacctctgagctggtactccgacccagggctggcaggggtgtccctgactgggggactgtcctacaaagaagatacaaaagaactggtggtggctaaagctggggtgtactatgtgttttttcagctggaactgaggcgggtggtggctggggagggctcaggatctgtgtccctggctctgcatctgcagccactgcgctctgcagcaggggctgcagcactggccctgactgtggacctgcccccagcttcttccgaggccagaaacagcgccttcgggttccaaggacgcctgctgcatctgagcgccggacagcgcctgggagtgcatctgcatactgaagccagagcccggcatgcttggcagctgactcagggggcaactgtgctgggactgtttcgcgtgacacctgagatcccagccgggctc

SEQ ID NO: 102 - DNA, 1902 bp, Artificial Sequence
  Description of Artificial Sequence: Synthetic polynucleotide
  nucleotide sequence of anti-FAP(4B9) Fc knob monomeric 4-1BB (71-248) ligand
gaggtgcagctgctcgaaagcggcggaggactggtgcagcctggcggcagcctgagactgtcttgcgccgccagcggcttcaccttcagcagctacgccatgagctgggtccgccaggcccctggcaagggactggaatgggtgtccgccatcatcggctctggcgccagcacctactacgccgacagcgtgaagggccggttcaccatcagccgggacaacagcaagaacaccctgtacctgcagatgaacagcctgcgggccgaggacaccgccgtgtactactgcgccaagggatggttcggcggcttcaactactggggacagggcaccctggtcacagtgtccagcgctagcaccaagggcccatcggtcttccccctggcaccctcctccaagagcacctctgggggcacagcggccctgggctgcctggtcaaggactacttccccgaaccggtgacggtgtcgtggaactcaggcgccctgaccagcggcgtgcacaccttcccggctgtcctacagtcctcaggactctactccctcagcagcgtggtgaccgtgccctccagcagcttgggcacccagacctacatctgcaacgtgaatcacaagcccagcaacaccaaggtggacaagaaagttgagcccaaatcttgtgacaaaactcacacatgcccaccgtgcccagcacctgaagctgcagggggaccgtcagtcttcctcttccccccaaaacccaaggacaccctcatgatctcccggacccctgaggtcacatgcgtggtggtggacgtgagccacgaagaccctgaggtcaagttcaactggtacgtggacggcgtggaggtgcataatgccaagacaaagccgcgggaggagcagtacaacagcacgtaccgtgtggtcagcgtcctcaccgtcctgcaccaggactggctgaatggcaaggagtacaagtgcaaggtctccaacaaagccctcggcgcccccatcgagaaaaccatctccaaagccaaagggcagccccgagaaccacaggtgtacaccctgcccccctgcagagatgagctgaccaagaaccaggtgtccctgtggtgtctggtcaagggcttctaccccagcgatatcgccgtggagtgggagagcaacggccagcctgagaacaactacaagaccaccccccctgtgctggacagcgacggcagcttcttcctgtactccaaactgaccgtggacaagagccggtggcagcagggcaacgtgttcagctgcagcgtgatgcacgaggccctgcacaaccactacacccagaagtccctgagcctgagccccggcggaggcggcggaagcggaggaggaggatccagagagggccctgagctgagccctgatgatcctgccggactgctggacctgcggcagggaatgtttgcccagctggtggcccagaacgtgctgctgatcgatggccccctgtcctggtacagcgatcctggactggctggcgtgtcactgacaggcggcctgagctacaaagaggacaccaaagaactggtggtggccaaggccggcgtgtactacgtgttctttcagctggaactgcggagagtggtggccggcgaaggatctggctctgtgtctctggccctgcatctgcagcctctgagatctgctgctggcgccgctgctctggcactgacagtggatctgcctcctgccagcagcgaggcccggaatagcgcatttgggtttcaaggcaggctgctgcacctgtctgccggccagaggctgggagtgcatctgcacacagaggccagggctagacacgcctggcagctgacacagggcgctacagtgctgggcctgttcagagtgacccccgagattcctgccgggctc

SEQ ID NO: 103 - DNA, 645 bp, Artificial Sequence
  Description of Artificial Sequence: Synthetic polynucleotide
  nucleotide sequence of anti-FAP(4B9) light chain
gagatcgtgctgacccagtcccccggcaccctgtctctgagccctggcgagagagccaccctgtcctgcagagcctcccagtccgtgacctcctcctacctcgcctggtatcagcagaagcccggccaggcccctcggctgctgatcaacgtgggcagtcggagagccaccggcatccctgaccggttctccggctctggctccggcaccgacttcaccctgaccatctcccggctggaacccgaggacttcgccgtgtactactgccagcagggcatcatgctgccccccacctttggccagggcaccaaggtggaaatcaagcgtacggtggctgcaccatctgtcttcatcttcccgccatctgatgagcagttgaaatctggaactgcctctgttgtgtgcctgctgaataacttctatcccagagaggccaaagtacagtggaaggtggataacgccctccaatcgggtaactcccaggagagtgtcacagagcaggacagcaaggacagcacctacagcctcagcagcaccctgacgctgagcaaagcagactacgagaaacacaaagtctacgcctgcgaagtcacccatcagggcctgagctcgcccgtcacaaagagcttcaacaggggagagtgt

SEQ ID NO: 104 - protein, 602 aa, Artificial Sequence
  Description of Artificial Sequence: Synthetic polypeptide
  Fc hole dimeric 4-1BB (71-248) ligand chain
DKTHTCPPCPAPEAAGGPSVFLFPPKPKDTLMISRTPEVTCVVVDVSHEDPEVKFNWYVDGVEVHNAKTKPREEQYNSTYRVVSVLTVLHQDWLNGKEYKCKVSNKALGAPIEKTISKAKGQPREPQVCTLPPSRDELTKNQVSLSCAVKGFYPSDIAVEWESNGQPENNYKTTPPVLDSDGSFFLVSKLTVDKSRWQQGNVFSCSVMHEALHNHYTQKSLSLSPGGGGGSGGGGSREGPELSPDDPAGLLDLRQGMFAQLVAQNVLLIDGPLSWYSDPGLAGVSLTGGLSYKEDTKELVVAKAGVYYVFFQLELRRVVAGEGSGSVSLALHLQPLRSAAGAAALALTVDLPPASSEARNSAFGFQGRLLHLSAGQRLGVHLHTEARARHAWQLTQGATVLGLFRVTPEIPAGLGGGGSGGGGSREGPELSPDDPAGLLDLRQGMFAQLVAQNVLLIDGPLSWYSDPGLAGVSLTGGLSYKEDTKELVVAKAGVYYVFFQLELRRVVAGEGSGSVSLALHLQPLRSAAGAAALALTVDLPPASSEARNSAFGFQGRLLHLSAGQRLGVHLHTEARARHAWQLTQGATVLGLFRVTPEIPAGL

SEQ ID NO: 105 - protein, 634 aa, Artificial Sequence
  Description of Artificial Sequence: Synthetic polypeptide
  anti-FAP(4B9) Fc knob monomeric 41-BB (71-248) ligand
EVQLLESGGGLVQPGGSLRLSCAASGFTFSSYAMSWVRQAPGKGLEWVSAIIGSGASTYYADSVKGRFTISRDNSKNTLYLQMNSLRAEDTAVYYCAKGWFGGFNYWGQGTLVTVSSASTKGPSVFPLAPSSKSTSGGTAALGCLVKDYFPEPVTVSWNSGALTSGVHTFPAVLQSSGLYSLSSVVTVPSSSLGTQTYICNVNHKPSNTKVDKKVEPKSCDKTHTCPPCPAPEAAGGPSVFLFPPKPKDTLMISRTPEVTCVVVDVSHEDPEVKFNWYVDGVEVHNAKTKPREEQYNSTYRVVSVLTVLHQDWLNGKEYKCKVSNKALGAPIEKTISKAKGQPREPQVYTLPPCRDELTKNQVSLWCLVKGFYPSDIAVEWESNGQPENNYKTTPPVLDSDGSFFLYSKLTVDKSRWQQGNVFSCSVMHEALHNHYTQKSLSLSPGGGGGSGGGGSREGPELSPDDPAGLLDLRQGMFAQLVAQNVLLIDGPLSWYSDPGLAGVSLTGGLSYKEDTKELVVAKAGVYYVFFQLELRRVVAGEGSGSVSLALHLQPLRSAAGAAALALTVDLPPASSEARNSAFGFQGRLLHLSAGQRLGVHLHTEARARHAWQLTQGATVLGLFRVTPEIPAGL

SEQ ID NO: 106 - protein, 215 aa, Artificial Sequence
  Description of Artificial Sequence: Synthetic polypeptide
  anti-FAP(4B9) light chain
EIVLTQSPGTLSLSPGERATLSCRASQSVTSSYLAWYQQKPGQAPRLLINVGSRRATGIPDRFSGSGSGTDFTLTISRLEPEDFAVYYCQQGIMLPPTFGQGTKVEIKRTVAAPSVFIFPPSDEQLKSGTASVVCLLNNFYPREAKVQWKVDNALQSGNSQESVTEQDSKDSTYSLSSTLTLSKADYEKHKVYACEVTHQGLSSPVTKSFNRGEC

SEQ ID NO: 107 - DNA, 1212 bp, Artificial Sequence
  Description of Artificial Sequence: Synthetic polynucleotide
  nucleotide sequence of Fc hole monomeric 4-1BBL (71-248) chain
gacaaaactcacacatgcccaccgtgcccagcacctgaagctgcagggggaccgtcagtcttcctcttccccccaaaacccaaggacaccctcatgatctcccggacccctgaggtcacatgcgtggtggtggacgtgagccacgaagaccctgaggtcaagttcaactggtacgtggacggcgtggaggtgcataatgccaagacaaagccgcgggaggagcagtacaacagcacgtaccgtgtggtcagcgtcctcaccgtcctgcaccaggactggctgaatggcaaggagtacaagtgcaaggtctccaacaaagccctcggcgcccccatcgagaaaaccatctccaaagccaaagggcagccccgagaaccacaggtgtgcaccctgcccccatcccgggatgagctgaccaagaaccaggtcagcctctcgtgcgcagtcaaaggcttctatcccagcgacatcgccgtggagtgggagagcaatgggcagccggagaacaactacaagaccacgcctcccgtgctggactccgacggctccttcttcctcgtgagcaagctcaccgtggacaagagcaggtggcagcaggggaacgtcttctcatgctccgtgatgcatgaggctctgcacaaccactacacgcagaagagcctctccctgtctccgggtagagagggccctgagctgagccctgatgatcctgccggactgctggacctgcggcagggaatgtttgcccagctggtggcccagaacgtgctgctgatcgatggccccctgtcctggtacagcgatcctggactggctggcgtgtcactgacaggcggcctgagctacaaagaggacaccaaagaactggtggtggccaaggccggcgtgtactacgtgttctttcagctggaactgcggagagtggtggccggcgaaggatctggctctgtgtctctggccctgcatctgcagcctctgagatctgctgctggcgccgctgctctggcactgacagtggatctgcctcctgccagcagcgaggcccggaatagcgcatttgggtttcaaggcaggctgctgcacctgtctgccggccagaggctgggagtgcatctgcacacagaggccagggctagacacgcctggcagctgacacagggcgctacagtgctgggcctgttcagagtgacccccgagattcctgccgggctc

SEQ ID NO: 108 - DNA, 2436 bp, Artificial Sequence
  Description of Artificial Sequence: Synthetic polynucleotide
  nucleotide sequence of anti-FAP(4B9) Fc knob dimeric 4-1BB ligand (71-248)
gaggtgcagctgctcgaaagcggcggaggactggtgcagcctggcggcagcctgagactgtcttgcgccgccagcggcttcaccttcagcagctacgccatgagctgggtccgccaggcccctggcaagggactggaatgggtgtccgccatcatcggctctggcgccagcacctactacgccgacagcgtgaagggccggttcaccatcagccgggacaacagcaagaacaccctgtacctgcagatgaacagcctgcgggccgaggacaccgccgtgtactactgcgccaagggatggttcggcggcttcaactactggggacagggcaccctggtcacagtgtccagcgctagcaccaagggcccatcggtcttccccctggcaccctcctccaagagcacctctgggggcacagcggccctgggctgcctggtcaaggactacttccccgaaccggtgacggtgtcgtggaactcaggcgccctgaccagcggcgtgcacaccttcccggctgtcctacagtcctcaggactctactccctcagcagcgtggtgaccgtgccctccagcagcttgggcacccagacctacatctgcaacgtgaatcacaagcccagcaacaccaaggtggacaagaaagttgagcccaaatcttgtgacaaaactcacacatgcccaccgtgcccagcacctgaagctgcagggggaccgtcagtcttcctcttccccccaaaacccaaggacaccctcatgatctcccggacccctgaggtcacatgcgtggtggtggacgtgagccacgaagaccctgaggtcaagttcaactggtacgtggacggcgtggaggtgcataatgccaagacaaagccgcgggaggagcagtacaacagcacgtaccgtgtggtcagcgtcctcaccgtcctgcaccaggactggctgaatggcaaggagtacaagtgcaaggtctccaacaaagccctcggcgcccccatcgagaaaaccatctccaaagccaaagggcagccccgagaaccacaggtgtacaccctgcccccctgcagagatgagctgaccaagaaccaggtgtccctgtggtgtctggtcaagggcttctaccccagcgatatcgccgtggagtgggagagcaacggccagcctgagaacaactacaagaccaccccccctgtgctggacagcgacggcagcttcttcctgtactccaaactgaccgtggacaagagccggtggcagcagggcaacgtgttcagctgcagcgtgatgcacgaggccctgcacaaccactacacccagaagtccctgagcctgagccccggcagagagggccctgagctgagccctgatgatcctgccggactgctggacctgcggcagggaatgtttgcccagctggtggcccagaacgtgctgctgatcgatggccccctgtcctggtacagcgatcctggactggctggcgtgtcactgacaggcggcctgagctacaaagaggacaccaaagaactggtggtggccaaggccggcgtgtactacgtgttctttcagctggaactgcggagagtggtggccggcgaaggatctggctctgtgtctctggccctgcatctgcagcctctgagatctgctgctggcgccgctgctctggcactgacagtggatctgcctcctgccagcagcgaggcccggaatagcgcatttgggtttcaaggcaggctgctgcacctgtctgccggccagaggctgggagtgcatctgcacacagaggccagggctagacacgcctggcagctgacacagggcgctacagtgctgggcctgttcagagtgacccccgagattccagcaggcctgggaggcggcggatctggcggcggaggatctagagaaggacccgagctgtcccccgacgatcccgctgggctgctggatctgagacagggcatgttcgctcagctggtggctcagaatgtgctgctgattgacggacctctgagctggtactccgacccagggctggcaggggtgtccctgactgggggactgtcctacaaagaagatacaaaagaactggtggtggctaaagctggggtgtactatgtgttttttcagctggaactgaggcgggtggtggctggggagggctcaggatctgtgtccctggctctgcatctgcagccactgcgctctgcagcaggggctgcagcactggccctgactgtggacctgcccccagcttcttccgaggccagaaacagcgccttcgggttccaaggacgcctgctgcatctgagcgccggacagcgcctgggagtgcatctgcatactgaagccagagcccggcatgcttggcagctgactcagggggcaactgtgctgggactgtttcgcgtgacacctgagatcccagccgggctc

SEQ ID NO: 109 - protein, 404 aa, Artificial Sequence
  Description of Artificial Sequence: Synthetic polypeptide
  Fc hole monomeric 4-1BB ligand (71-248) chain
DKTHTCPPCPAPEAAGGPSVFLFPPKPKDTLMISRTPEVTCVVVDVSHEDPEVKFNWYVDGVEVHNAKTKPREEQYNSTYRVVSVLTVLHQDWLNGKEYKCKVSNKALGAPIEKTISKAKGQPREPQVCTLPPSRDELTKNQVSLSCAVKGFYPSDIAVEWESNGQPENNYKTTPPVLDSDGSFFLVSKLTVDKSRWQQGNVFSCSVMHEALHNHYTQKSLSLSPGREGPELSPDDPAGLLDLRQGMFAQLVAQNVLLIDGPLSWYSDPGLAGVSLTGGLSYKEDTKELVVAKAGVYYVFFQLELRRVVAGEGSGSVSLALHLQPLRSAAGAAALALTVDLPPASSEARNSAFGFQGRLLHLSAGQRLGVHLHTEARARHAWQLTQGATVLGLFRVTPEIPAGL

SEQ ID NO: 110 - protein, 812 aa, Artificial Sequence
  Description of Artificial Sequence: Synthetic polypeptide
  anti-FAP(4B9) Fc knob dimeric 4-1BB ligand (71-248)
EVQLLESGGGLVQPGGSLRLSCAASGFTFSSYAMSWVRQAPGKGLEWVSAIIGSGASTYYADSVKGRFTISRDNSKNTLYLQMNSLRAEDTAVYYCAKGWFGGFNYWGQGTLVTVSSASTKGPSVFPLAPSSKSTSGGTAALGCLVKDYFPEPVTVSWNSGALTSGVHTFPAVLQSSGLYSLSSVVTVPSSSLGTQTYICNVNHKPSNTKVDKKVEPKSCDKTHTCPPCPAPEAAGGPSVFLFPPKPKDTLMISRTPEVTCVVVDVSHEDPEVKFNWYVDGVEVHNAKTKPREEQYNSTYRVVSVLTVLHQDWLNGKEYKCKVSNKALGAPIEKTISKAKGQPREPQVYTLPPCRDELTKNQVSLWCLVKGFYPSDIAVEWESNGQPENNYKTTPPVLDSDGSFFLYSKLTVDKSRWQQGNVFSCSVMHEALHNHYTQKSLSLSPGREGPELSPDDPAGLLDLRQGMFAQLVAQNVLLIDGPLSWYSDPGLAGVSLTGGLSYKEDTKELVVAKAGVYYVFFQLELRRVVAGEGSGSVSLALHLQPLRSAAGAAALALTVDLPPASSEARNSAFGFQGRLLHLSAGQRLGVHLHTEARARHAWQLTQGATVLGLFRVTPEIPAGLGGGGSGGGGSREGPELSPDDPAGLLDLRQGMFAQLVAQNVLLIDGPLSWYSDPGLAGVSLTGGLSYKEDTKELVVAKAGVYYVFFQLELRRVVAGEGSGSVSLALHLQPLRSAAGAAALALTVDLPPASSEARNSAFGFQGRLLHLSAGQRLGVHLHTEARARHAWQLTQGATVLGLFRVTPEIPAGL

SEQ ID NO: 111 - DNA, 1899 bp, Artificial Sequence
  Description of Artificial Sequence: Synthetic polynucleotide
  nucleotide sequence of anti-FAP(28H1) Fc knob monomeric 4-1BB ligand (71-248)
gaagtgcagctgctggaatccggcggaggcctggtgcagcctggcggatctctgagactgtcctgcgccgcctccggcttcaccttctcctcccacgccatgtcctgggtccgacaggctcctggcaaaggcctggaatgggtgtccgccatctgggcctccggcgagcagtactacgccgactctgtgaagggccggttcaccatctcccgggacaactccaagaacaccctgtacctgcagatgaactccctgcgggccgaggacaccgccgtgtactactgtgccaagggctggctgggcaacttcgactactggggacagggcaccctggtcaccgtgtccagcgctagcaccaagggcccatcggtcttccccctggcaccctcctccaagagcacctctgggggcacagcggccctgggctgcctggtcaaggactacttccccgaaccggtgacggtgtcgtggaactcaggcgccctgaccagcggcgtgcacaccttcccggctgtcctacagtcctcaggactctactccctcagcagcgtggtgaccgtgccctccagcagcttgggcacccagacctacatctgcaacgtgaatcacaagcccagcaacaccaaggtggacaagaaagttgagcccaaatcttgtgacaaaactcacacatgcccaccgtgcccagcacctgaagctgcagggggaccgtcagtcttcctcttccccccaaaacccaaggacaccctcatgatctcccggacccctgaggtcacatgcgtggtggtggacgtgagccacgaagaccctgaggtcaagttcaactggtacgtggacggcgtggaggtgcataatgccaagacaaagccgcgggaggagcagtacaacagcacgtaccgtgtggtcagcgtcctcaccgtcctgcaccaggactggctgaatggcaaggagtacaagtgcaaggtctccaacaaagccctcggcgcccccatcgagaaaaccatctccaaagccaaagggcagccccgagaaccacaggtgtacaccctgcccccctgcagagatgagctgaccaagaaccaggtgtccctgtggtgtctggtcaagggcttctaccccagcgatatcgccgtggagtgggagagcaacggccagcctgagaacaactacaagaccaccccccctgtgctggacagcgacggcagcttcttcctgtactccaaactgaccgtggacaagagccggtggcagcagggcaacgtgttcagctgcagcgtgatgcacgaggccctgcacaaccactacacccagaagtccctgagcctgagccccggcggaggcggcggaagcggaggaggaggatccagagagggccctgagctgagccctgatgatcctgccggactgctggacctgcggcagggaatgtttgcccagctggtggcccagaacgtgctgctgatcgatggccccctgtcctggtacagcgatcctggactggctggcgtgtcactgacaggcggcctgagctacaaagaggacaccaaagaactggtggtggccaaggccggcgtgtactacgtgttctttcagctggaactgcggagagtggtggccggcgaaggatctggctctgtgtctctggccctgcatctgcagcctctgagatctgctgctggcgccgctgctctggcactgacagtggatctgcctcctgccagcagcgaggcccggaatagcgcatttgggtttcaaggcaggctgctgcacctgtctgccggccagaggctgggagtgcatctgcacacagaggccagggctagacacgcctggcagctgacacagggcgctacagtgctgggcctgttcagagtgacccccgagattcctgccgggctc

SEQ ID NO: 112 - DNA, 645 bp, Artificial Sequence
  Description of Artificial Sequence: Synthetic polynucleotide
  nucleotide sequence of anti-FAP(28H1) light chain
gagatcgtgctgacccagtcccccggcaccctgtctctgagccctggcgagagagccaccctgtcctgcagagcctcccagtccgtgtcccggtcctacctcgcctggtatcagcagaagcccggccaggcccctcggctgctgatcatcggcgcctctaccagagccaccggcatccctgaccggttctccggctctggctccggcaccgacttcaccctgaccatctcccggctggaacccgaggacttcgccgtgtactactgccagcagggccaggtcatccctcccacctttggccagggcaccaaggtggaaatcaagcgtacggtggctgcaccatctgtcttcatcttcccgccatctgatgagcagttgaaatctggaactgcctctgttgtgtgcctgctgaataacttctatcccagagaggccaaagtacagtggaaggtggataacgccctccaatcgggtaactcccaggagagtgtcacagagcaggacagcaaggacagcacctacagcctcagcagcaccctgacgctgagcaaagcagactacgagaaacacaaagtctacgcctgcgaagtcacccatcagggcctgagctcgcccgtcacaaagagcttcaacaggggagagtgt

SEQ ID NO: 113 - protein, 633 aa, Artificial Sequence
  Description of Artificial Sequence: Synthetic polypeptide
  anti-FAP(28H1) Fc knob monomeric 4-1BB ligand (71-248)
EVQLLESGGGLVQPGGSLRLSCAASGFTFSSHAMSWVRQAPGKGLEWVSAIWASGEQYYADSVKGRFTISRDNSKNTLYLQMNSLRAEDTAVYYCAKGWLGNFDYWGQGTLVTVSSASTKGPSVFPLAPSSKSTSGGTAALGCLVKDYFPEPVTVSWNSGALTSGVHTFPAVLQSSGLYSLSSVVTVPSSSLGTQTYICNVNHKPSNTKVDKKVEPKSCDKTHTCPPCPAPEAAGGPSVFLFPPKPKDTLMISRTPEVTCVVVDVSHEDPEVKFNWYVDGVEVHNAKTKPREEQYNSTYRVVSVLTVLHQDWLNGKEYKCKVSNKALGAPIEKTISKAKGQPREPQVYTLPPCRDELTKNQVSLWCLVKGFYPSDIAVEWESNGQPENNYKTTPPVLDSDGSFFLYSKLTVDKSRWQQGNVFSCSVMHEALHNHYTQKSLSLSPGGGGGSGGGGSREGPELSPDDPAGLLDLRQGMFAQLVAQNVLLIDGPLSWYSDPGLAGVSLTGGLSYKEDTKELVVAKAGVYYVFFQLELRRVVAGEGSGSVSLALHLQPLRSAAGAAALALTVDLPPASSEARNSAFGFQGRLLHLSAGQRLGVHLHTEARARHAWQLTQGATVLGLFRVTPEIPAGL

SEQ ID NO: 114 - protein, 215 aa, Artificial Sequence
  Description of Artificial Sequence: Synthetic polypeptide
  anti-FAP(28H1) light chain
EIVLTQSPGTLSLSPGERATLSCRASQSVSRSYLAWYQQKPGQAPRLLIIGASTRATGIPDRFSGSGSGTDFTLTISRLEPEDFAVYYCQQGQVIPPTFGQGTKVEIKRTVAAPSVFIFPPSDEQLKSGTASVVCLLNNFYPREAKVQWKVDNALQSGNSQESVTEQDSKDSTYSLSSTLTLSKADYEKHKVYACEVTHQGLSSPVTKSFNRGEC

SEQ ID NO: 115 - DNA, 2433 bp, Artificial Sequence
  Description of Artificial Sequence: Synthetic polynucleotide
  nucleotide sequence of anti-FAP(28H1) Fc knob dimeric 4-1BB ligand (71-248)
gaagtgcagctgctggaatccggcggaggcctggtgcagcctggcggatctctgagactgtcctgcgccgcctccggcttcaccttctcctcccacgccatgtcctgggtccgacaggctcctggcaaaggcctggaatgggtgtccgccatctgggcctccggcgagcagtactacgccgactctgtgaagggccggttcaccatctcccgggacaactccaagaacaccctgtacctgcagatgaactccctgcgggccgaggacaccgccgtgtactactgtgccaagggctggctgggcaacttcgactactggggacagggcaccctggtcaccgtgtccagcgctagcaccaagggcccatcggtcttccccctggcaccctcctccaagagcacctctgggggcacagcggccctgggctgcctggtcaaggactacttccccgaaccggtgacggtgtcgtggaactcaggcgccctgaccagcggcgtgcacaccttcccggctgtcctacagtcctcaggactctactccctcagcagcgtggtgaccgtgccctccagcagcttgggcacccagacctacatctgcaacgtgaatcacaagcccagcaacaccaaggtggacaagaaagttgagcccaaatcttgtgacaaaactcacacatgcccaccgtgcccagcacctgaagctgcagggggaccgtcagtcttcctcttccccccaaaacccaaggacaccctcatgatctcccggacccctgaggtcacatgcgtggtggtggacgtgagccacgaagaccctgaggtcaagttcaactggtacgtggacggcgtggaggtgcataatgccaagacaaagccgcgggaggagcagtacaacagcacgtaccgtgtggtcagcgtcctcaccgtcctgcaccaggactggctgaatggcaaggagtacaagtgcaaggtctccaacaaagccctcggcgcccccatcgagaaaaccatctccaaagccaaagggcagccccgagaaccacaggtgtacaccctgcccccctgcagagatgagctgaccaagaaccaggtgtccctgtggtgtctggtcaagggcttctaccccagcgatatcgccgtggagtgggagagcaacggccagcctgagaacaactacaagaccaccccccctgtgctggacagcgacggcagcttcttcctgtactccaaactgaccgtggacaagagccggtggcagcagggcaacgtgttcagctgcagcgtgatgcacgaggccctgcacaaccactacacccagaagtccctgagcctgagccccggcagagagggccctgagctgagccctgatgatcctgccggactgctggacctgcggcagggaatgtttgcccagctggtggcccagaacgtgctgctgatcgatggccccctgtcctggtacagcgatcctggactggctggcgtgtcactgacaggcggcctgagctacaaagaggacaccaaagaactggtggtggccaaggccggcgtgtactacgtgttctttcagctggaactgcggagagtggtggccggcgaaggatctggctctgtgtctctggccctgcatctgcagcctctgagatctgctgctggcgccgctgctctggcactgacagtggatctgcctcctgccagcagcgaggcccggaatagcgcatttgggtttcaaggcaggctgctgcacctgtctgccggccagaggctgggagtgcatctgcacacagaggccagggctagacacgcctggcagctgacacagggcgctacagtgctgggcctgttcagagtgacccccgagattccagcaggcctgggaggcggcggatctggcggcggaggatctagagaaggacccgagctgtcccccgacgatcccgctgggctgctggatctgagacagggcatgttcgctcagctggtggctcagaatgtgctgctgattgacggacctctgagctggtactccgacccagggctggcaggggtgtccctgactgggggactgtcctacaaagaagatacaaaagaactggtggtggctaaagctggggtgtactatgtgttttttcagctggaactgaggcgggtggtggctggggagggctcaggatctgtgtccctggctctgcatctgcagccactgcgctctgcagcaggggctgcagcactggccctgactgtggacctgcccccagcttcttccgaggccagaaacagcgccttcgggttccaaggacgcctgctgcatctgagcgccggacagcgcctgggagtgcatctgcatactgaagccagagcccggcatgcttggcagctgactcagggggcaactgtgctgggactgtttcgcgtgacacctgagatcccagccgggctc

SEQ ID NO: 116 - protein, 811 aa, Artificial Sequence
  Description of Artificial Sequence: Synthetic polypeptide
  anti-FAP(28H1) Fc knob dimeric 4-1BB ligand (71-248)
EVQLLESGGGLVQPGGSLRLSCAASGFTFSSHAMSWVRQAPGKGLEWVSAIWASGEQYYADSVKGRFTISRDNSKNTLYLQMNSLRAEDTAVYYCAKGWLGNFDYWGQGTLVTVSSASTKGPSVFPLAPSSKSTSGGTAALGCLVKDYFPEPVTVSWNSGALTSGVHTFPAVLQSSGLYSLSSVVTVPSSSLGTQTYICNVNHKPSNTKVDKKVEPKSCDKTHTCPPCPAPEAAGGPSVFLFPPKPKDTLMISRTPEVTCVVVDVSHEDPEVKFNWYVDGVEVHNAKTKPREEQYNSTYRVVSVLTVLHQDWLNGKEYKCKVSNKALGAPIEKTISKAKGQPREPQVYTLPPCRDELTKNQVSLWCLVKGFYPSDIAVEWESNGQPENNYKTTPPVLDSDGSFFLYSKLTVDKSRWQQGNVFSCSVMHEALHNHYTQKSLSLSPGREGPELSPDDPAGLLDLRQGMFAQLVAQNVLLIDGPLSWYSDPGLAGVSLTGGLSYKEDTKELVVAKAGVYYVFFQLELRRVVAGEGSGSVSLALHLQPLRSAAGAAALALTVDLPPASSEARNSAFGFQGRLLHLSAGQRLGVHLHTEARARHAWQLTQGATVLGLFRVTPEIPAGLGGGGSGGGGSREGPELSPDDPAGLLDLRQGMFAQLVAQNVLLIDGPLSWYSDPGLAGVSLTGGLSYKEDTKELVVAKAGVYYVFFQLELRRVVAGEGSGSVSLALHLQPLRSAAGAAALALTVDLPPASSEARNSAFGFQGRLLHLSAGQRLGVHLHTEARARHAWQLTQGATVLGLFRVTPEIPAGL

SEQ ID NO: 117 - DNA, 1914 bp, Artificial Sequence
  Description of Artificial Sequence: Synthetic polynucleotide
  nucleotide sequence of anti-CD19(8B8-018) Fc knob monomeric 4-1BB (71-248) ligand
caggtccagctggtgcagtccggcgccgaggtcaagaaacccggggcttctgtgaaggtttcatgcaaggcaagcggatacaccttcaccgactatatcatgcattgggtcaggcaggcccctggccaaggtctcgaatggatgggctacattaacccatataatgatggctccaaatacaccgagaagtttcagggaagagtcactatgacatctgacaccagtatcagcactgcttacatggagctgtcccgccttcggtctgatgacaccgcagtgtattactgtgccaggggcacatattactacggctcagctctgttcgactattgggggcagggaaccacagtaaccgtgagctccgctagcaccaagggcccatcggtcttccccctggcaccctcctccaagagcacctctgggggcacagcggccctgggctgcctggtcaaggactacttccccgaaccggtgacggtgtcgtggaactcaggcgccctgaccagcggcgtgcacaccttcccggctgtcctacagtcctcaggactctactccctcagcagcgtggtgaccgtgccctccagcagcttgggcacccagacctacatctgcaacgtgaatcacaagcccagcaacaccaaggtggacaagaaagttgagcccaaatcttgtgacaaaactcacacatgcccaccgtgcccagcacctgaagctgcagggggaccgtcagtcttcctcttccccccaaaacccaaggacaccctcatgatctcccggacccctgaggtcacatgcgtggtggtggacgtgagccacgaagaccctgaggtcaagttcaactggtacgtggacggcgtggaggtgcataatgccaagacaaagccgcgggaggagcagtacaacagcacgtaccgtgtggtcagcgtcctcaccgtcctgcaccaggactggctgaatggcaaggagtacaagtgcaaggtctccaacaaagccctcggcgcccccatcgagaaaaccatctccaaagccaaagggcagccccgagaaccacaggtgtacaccctgcccccctgcagagatgagctgaccaagaaccaggtgtccctgtggtgtctggtcaagggcttctaccccagcgatatcgccgtggagtgggagagcaacggccagcctgagaacaactacaagaccaccccccctgtgctggacagcgacggcagcttcttcctgtactccaaactgaccgtggacaagagccggtggcagcagggcaacgtgttcagctgcagcgtgatgcacgaggccctgcacaaccactacacccagaagtccctgagcctgagccccggcggaggcggcggaagcggaggaggaggatccagagagggccctgagctgagccctgatgatcctgccggactgctggacctgcggcagggaatgtttgcccagctggtggcccagaacgtgctgctgatcgatggccccctgtcctggtacagcgatcctggactggctggcgtgtcactgacaggcggcctgagctacaaagaggacaccaaagaactggtggtggccaaggccggcgtgtactacgtgttctttcagctggaactgcggagagtggtggccggcgaaggatctggctctgtgtctctggccctgcatctgcagcctctgagatctgctgctggcgccgctgctctggcactgacagtggatctgcctcctgccagcagcgaggcccggaatagcgcatttgggtttcaaggcaggctgctgcacctgtctgccggccagaggctgggagtgcatctgcacacagaggccagggctagacacgcctggcagctgacacagggcgctacagtgctgggcctgttcagagtgacccccgagattcctgccgggctc

SEQ ID NO: 118 - DNA, 657 bp, Artificial Sequence
  Description of Artificial Sequence: Synthetic polynucleotide
  nucleotide sequence of anti-CD19(8B8-018) light chain
gacatcgtcatgacccagacacccctgtccctctctgtgacccctggccagccagcctcaattagctgcaagtcctctcaaagtctggagaaccccaatgggaacacttaccttaattggtatctgcagaaacccggacaatcccctcaactcctgatctacagggtctctaagagattctcaggcgtgccagatcgctttagcggttccgggtctggcacagacttcaccttgaagattagtcgggttgaagctgaggatgtgggagtctattactgtctgcagctcactcatgtgccctacacctttggtcagggcacaaaactggagatcaagcggaccgtggccgctccctccgtgttcatcttcccaccctccgacgagcagctgaagtccggcaccgccagcgtggtgtgcctgctgaacaacttctacccccgcgaggccaaggtgcagtggaaggtggacaacgccctgcagtccggcaactcccaggaatccgtgaccgagcaggactccaaggacagcacctactccctgtcctccaccctgaccctgtccaaggccgactacgagaagcacaaggtgtacgcctgcgaagtgacccaccagggcctgtccagccccgtgaccaagtccttcaaccggggcgagtgc

SEQ ID NO: 119 - protein, 638 aa, Artificial Sequence
  Description of Artificial Sequence: Synthetic polypeptide
  anti-CD19(8B8-018) Fc knob monomeric 4-1-BB (71-248) ligand
QVQLVQSGAEVKKPGASVKVSCKASGYTFTDYIMHWVRQAPGQGLEWMGYINPYNDGSKYTEKFQGRVTMTSDTSISTAYMELSRLRSDDTAVYYCARGTYYYGSALFDYWGQGTTVTVSSASTKGPSVFPLAPSSKSTSGGTAALGCLVKDYFPEPVTVSWNSGALTSGVHTFPAVLQSSGLYSLSSVVTVPSSSLGTQTYICNVNHKPSNTKVDKKVEPKSCDKTHTCPPCPAPEAAGGPSVFLFPPKPKDTLMISRTPEVTCVVVDVSHEDPEVKFNWYVDGVEVHNAKTKPREEQYNSTYRVVSVLTVLHQDWLNGKEYKCKVSNKALGAPIEKTISKAKGQPREPQVYTLPPCRDELTKNQVSLWCLVKGFYPSDIAVEWESNGQPENNYKTTPPVLDSDGSFFLYSKLTVDKSRWQQGNVFSCSVMHEALHNHYTQKSLSLSPGGGGGSGGGGSREGPELSPDDPAGLLDLRQGMFAQLVAQNVLLIDGPLSWYSDPGLAGVSLTGGLSYKEDTKELVVAKAGVYYVFFQLELRRVVAGEGSGSVSLALHLQPLRSAAGAAALALTVDLPPASSEARNSAFGFQGRLLHLSAGQRLGVHLHTEARARHAWQLTQGATVLGLFRVTPEIPAGL

SEQ ID NO: 120 - protein, 219 aa, Artificial Sequence
  Description of Artificial Sequence: Synthetic polypeptide
  anti-CD19(8B8-018) light chain
DIVMTQTPLSLSVTPGQPASISCKSSQSLENPNGNTYLNWYLQKPGQSPQLLIYRVSKRFSGVPDRFSGSGSGTDFTLKISRVEAEDVGVYYCLQLTHVPYTFGQGTKLEIKRTVAAPSVFIFPPSDEQLKSGTASVVCLLNNFYPREAKVQWKVDNALQSGNSQESVTEQDSKDSTYSLSSTLTLSKADYEKHKVYACEVTHQGLSSPVTKSFNRGEC

SEQ ID NO: 121 - DNA, 2448 bp, Artificial Sequence
  Description of Artificial Sequence: Synthetic polynucleotide
  nucleotide sequence of anti-CD19(8B8-018) Fc knob dimeric 4-1BB (71-248) ligand
caggtccagctggtgcagtccggcgccgaggtcaagaaacccggggcttctgtgaaggtttcatgcaaggcaagcggatacaccttcaccgactatatcatgcattgggtcaggcaggcccctggccaaggtctcgaatggatgggctacattaacccatataatgatggctccaaatacaccgagaagtttcagggaagagtcactatgacatctgacaccagtatcagcactgcttacatggagctgtcccgccttcggtctgatgacaccgcagtgtattactgtgccaggggcacatattactacggctcagctctgttcgactattgggggcagggaaccacagtaaccgtgagctccgctagcaccaagggcccatcggtcttccccctggcaccctcctccaagagcacctctgggggcacagcggccctgggctgcctggtcaaggactacttccccgaaccggtgacggtgtcgtggaactcaggcgccctgaccagcggcgtgcacaccttcccggctgtcctacagtcctcaggactctactccctcagcagcgtggtgaccgtgccctccagcagcttgggcacccagacctacatctgcaacgtgaatcacaagcccagcaacaccaaggtggacaagaaagttgagcccaaatcttgtgacaaaactcacacatgcccaccgtgcccagcacctgaagctgcagggggaccgtcagtcttcctcttccccccaaaacccaaggacaccctcatgatctcccggacccctgaggtcacatgcgtggtggtggacgtgagccacgaagaccctgaggtcaagttcaactggtacgtggacggcgtggaggtgcataatgccaagacaaagccgcgggaggagcagtacaacagcacgtaccgtgtggtcagcgtcctcaccgtcctgcaccaggactggctgaatggcaaggagtacaagtgcaaggtctccaacaaagccctcggcgcccccatcgagaaaaccatctccaaagccaaagggcagccccgagaaccacaggtgtacaccctgcccccctgcagagatgagctgaccaagaaccaggtgtccctgtggtgtctggtcaagggcttctaccccagcgatatcgccgtggagtgggagagcaacggccagcctgagaacaactacaagaccaccccccctgtgctggacagcgacggcagcttcttcctgtactccaaactgaccgtggacaagagccggtggcagcagggcaacgtgttcagctgcagcgtgatgcacgaggccctgcacaaccactacacccagaagtccctgagcctgagccccggcagagagggccctgagctgagccctgatgatcctgccggactgctggacctgcggcagggaatgtttgcccagctggtggcccagaacgtgctgctgatcgatggccccctgtcctggtacagcgatcctggactggctggcgtgtcactgacaggcggcctgagctacaaagaggacaccaaagaactggtggtggccaaggccggcgtgtactacgtgttctttcagctggaactgcggagagtggtggccggcgaaggatctggctctgtgtctctggccctgcatctgcagcctctgagatctgctgctggcgccgctgctctggcactgacagtggatctgcctcctgccagcagcgaggcccggaatagcgcatttgggtttcaaggcaggctgctgcacctgtctgccggccagaggctgggagtgcatctgcacacagaggccagggctagacacgcctggcagctgacacagggcgctacagtgctgggcctgttcagagtgacccccgagattccagcaggcctgggaggcggcggatctggcggcggaggatctagagaaggacccgagctgtcccccgacgatcccgctgggctgctggatctgagacagggcatgttcgctcagctggtggctcagaatgtgctgctgattgacggacctctgagctggtactccgacccagggctggcaggggtgtccctgactgggggactgtcctacaaagaagatacaaaagaactggtggtggctaaagctggggtgtactatgtgttttttcagctggaactgaggcgggtggtggctggggagggctcaggatctgtgtccctggctctgcatctgcagccactgcgctctgcagcaggggctgcagcactggccctgactgtggacctgcccccagcttcttccgaggccagaaacagcgccttcgggttccaaggacgcctgctgcatctgagcgccggacagcgcctgggagtgcatctgcatactgaagccagagcccggcatgcttggcagctgactcagggggcaactgtgctgggactgtttcgcgtgacacctgagatcccagccgggctc

SEQ ID NO: 122 - protein, 816 aa, Artificial Sequence
  Description of Artificial Sequence: Synthetic polypeptide
  anti-CD19(8B8-018) Fc knob dimeric 4-1BB (71-248) ligand
QVQLVQSGAEVKKPGASVKVSCKASGYTFTDYIMHWVRQAPGQGLEWMGYINPYNDGSKYTEKFQGRVTMTSDTSISTAYMELSRLRSDDTAVYYCARGTYYYGSALFDYWGQGTTVTVSSASTKGPSVFPLAPSSKSTSGGTAALGCLVKDYFPEPVTVSWNSGALTSGVHTFPAVLQSSGLYSLSSVVTVPSSSLGTQTYICNVNHKPSNTKVDKKVEPKSCDKTHTCPPCPAPEAAGGPSVFLFPPKPKDTLMISRTPEVTCVVVDVSHEDPEVKFNWYVDGVEVHNAKTKPREEQYNSTYRVVSVLTVLHQDWLNGKEYKCKVSNKALGAPIEKTISKAKGQPREPQVYTLPPCRDELTKNQVSLWCLVKGFYPSDIAVEWESNGQPENNYKTTPPVLDSDGSFFLYSKLTVDKSRWQQGNVFSCSVMHEALHNHYTQKSLSLSPGREGPELSPDDPAGLLDLRQGMFAQLVAQNVLLIDGPLSWYSDPGLAGVSLTGGLSYKEDTKELVVAKAGVYYVFFQLELRRVVAGEGSGSVSLALHLQPLRSAAGAAALALTVDLPPASSEARNSAFGFQGRLLHLSAGQRLGVHLHTEARARHAWQLTQGATVLGLFRVTPEIPAGLGGGGSGGGGSREGPELSPDDPAGLLDLRQGMFAQLVAQNVLLIDGPLSWYSDPGLAGVSLTGGLSYKEDTKELVVAKAGVYYVFFQLELRRVVAGEGSGSVSLALHLQPLRSAAGAAALALTVDLPPASSEARNSAFGFQGRLLHLSAGQRLGVHLHTEARARHAWQLTQGATVLGLFRVTPEIPAGL

SEQ ID NO: 123 - DNA, 1914 bp, Artificial Sequence
  Description of Artificial Sequence: Synthetic polynucleotide
  nucleotide sequence of anti-CD19(8B8-2B11) Fc knob monomeric 4-1BB (71-248) ligand
caggtgcaattggttcaatctggtgctgaagtaaaaaaaccgggcgcttccgttaaagtgagctgcaaagcatctggttacaccttcactgactatatcatgcactgggttcgtcaggccccgggccagggtctggagtggatgggctacattaacccatacaacgacggttccaaatataccgagaaattccagggccgcgtcacgatgaccagcgacacttctatctccaccgcgtacatggaactgtctagactgcgttctgacgacaccgctgtttactattgtgcacgcggtacctactactacggtccacagctgtttgattactggggccaaggtaccacggtgaccgtaagctctgctagcaccaagggcccatcggtcttccccctggcaccctcctccaagagcacctctgggggcacagcggccctgggctgcctggtcaaggactacttccccgaaccggtgacggtgtcgtggaactcaggcgccctgaccagcggcgtgcacaccttcccggctgtcctacagtcctcaggactctactccctcagcagcgtggtgaccgtgccctccagcagcttgggcacccagacctacatctgcaacgtgaatcacaagcccagcaacaccaaggtggacaagaaagttgagcccaaatcttgtgacaaaactcacacatgcccaccgtgcccagcacctgaagctgcagggggaccgtcagtcttcctcttccccccaaaacccaaggacaccctcatgatctcccggacccctgaggtcacatgcgtggtggtggacgtgagccacgaagaccctgaggtcaagttcaactggtacgtggacggcgtggaggtgcataatgccaagacaaagccgcgggaggagcagtacaacagcacgtaccgtgtggtcagcgtcctcaccgtcctgcaccaggactggctgaatggcaaggagtacaagtgcaaggtctccaacaaagccctcggcgcccccatcgagaaaaccatctccaaagccaaagggcagccccgagaaccacaggtgtacaccctgcccccctgcagagatgagctgaccaagaaccaggtgtccctgtggtgtctggtcaagggcttctaccccagcgatatcgccgtggagtgggagagcaacggccagcctgagaacaactacaagaccaccccccctgtgctggacagcgacggcagcttcttcctgtactccaaactgaccgtggacaagagccggtggcagcagggcaacgtgttcagctgcagcgtgatgcacgaggccctgcacaaccactacacccagaagtccctgagcctgagccccggcggaggcggcggaagcggaggaggaggatccagagagggccctgagctgagccctgatgatcctgccggactgctggacctgcggcagggaatgtttgcccagctggtggcccagaacgtgctgctgatcgatggccccctgtcctggtacagcgatcctggactggctggcgtgtcactgacaggcggcctgagctacaaagaggacaccaaagaactggtggtggccaaggccggcgtgtactacgtgttctttcagctggaactgcggagagtggtggccggcgaaggatctggctctgtgtctctggccctgcatctgcagcctctgagatctgctgctggcgccgctgctctggcactgacagtggatctgcctcctgccagcagcgaggcccggaatagcgcatttgggtttcaaggcaggctgctgcacctgtctgccggccagaggctgggagtgcatctgcacacagaggccagggctagacacgcctggcagctgacacagggcgctacagtgctgggcctgttcagagtgacccccgagattcctgccgggctc

SEQ ID NO: 124 - DNA, 1314 bp, Artificial Sequence
  Description of Artificial Sequence: Synthetic polynucleotide
  nucleotide sequence of anti-CD19(8B8-2B11) light chain
gatattgtcatgactcaaactccactgtctctgtccgtgaccccgggtcagccagcgagcatttcttgcaaatccagccaatctctggaaacctccaccggcaccacgtacctgaactggtatctccagaaaccgggtcagagcccgcagctgctgatctaccgtgtatctaagcgcttctccggcgttcctgatcgtttcagcggttctggatccggcaccgactttactctgaaaatcagccgtgtggaagctgaagacgttggcgtctactattgtctgcagctgctggaagatccatacaccttcggtcaaggaactaaactggaaattaaacgtacggtggctgcaccatctgtcttcatcttcccgccatctgatgagcagttgaaatctggaactgcctctgttgtgtgcctgctgaataacttctatcccagagaggccaaagtacagtggaaggtggataacgccctccaatcgggtaactcccaggagagtgtcacagagcaggacagcaaggacagcacctacagcctcagcagcaccctgacgctgagcaaagcagactacgagaaacacaaagtctacgcctgcgaagtcacccatcagggcctgagctcgcccgtcacaaagagcttcaacaggggagagtgtgatattgtcatgactcaaactccactgtctctgtccgtgaccccgggtcagccagcgagcatttcttgcaaatccagccaatctctggaaacctccaccggcaccacgtacctgaactggtatctccagaaaccgggtcagagcccgcagctgctgatctaccgtgtatctaagcgcttctccggcgttcctgatcgtttcagcggttctggatccggcaccgactttactctgaaaatcagccgtgtggaagctgaagacgttggcgtctactattgtctgcagctgctggaagatccatacaccttcggtcaaggaacgaaactggaaattaaacgtacggtggctgcaccatctgtcttcatcttcccgccatctgatgagcagttgaaatctggaactgcctctgttgtgtgcctgctgaataacttctatcccagagaggccaaagtacagtggaaggtggataacgccctccaatcgggtaactcccaggagagtgtcacagagcaggacagcaaggacagcacctacagcctcagcagcaccctgacgctgagcaaagcagactacgagaaacacaaagtctacgcctgcgaagtcacccatcagggcctgagctcgcccgtcacaaagagcttcaacaggggagagtgt

SEQ ID NO: 125 - protein, 638 aa, Artificial Sequence
  Description of Artificial Sequence: Synthetic polypeptide
  anti- CD19(8B8-2B11) Fc knob monomeric 4-1BB ligand (71-248)
QVQLVQSGAEVKKPGASVKVSCKASGYTFTDYIMHWVRQAPGQGLEWMGYINPYNDGSKYTEKFQGRVTMTSDTSISTAYMELSRLRSDDTAVYYCARGTYYYGPQLFDYWGQGTTVTVSSASTKGPSVFPLAPSSKSTSGGTAALGCLVKDYFPEPVTVSWNSGALTSGVHTFPAVLQSSGLYSLSSVVTVPSSSLGTQTYICNVNHKPSNTKVDKKVEPKSCDKTHTCPPCPAPEAAGGPSVFLFPPKPKDTLMISRTPEVTCVVVDVSHEDPEVKFNWYVDGVEVHNAKTKPREEQYNSTYRVVSVLTVLHQDWLNGKEYKCKVSNKALGAPIEKTISKAKGQPREPQVYTLPPCRDELTKNQVSLWCLVKGFYPSDIAVEWESNGQPENNYKTTPPVLDSDGSFFLYSKLTVDKSRWQQGNVFSCSVMHEALHNHYTQKSLSLSPGGGGGSGGGGSREGPELSPDDPAGLLDLRQGMFAQLVAQNVLLIDGPLSWYSDPGLAGVSLTGGLSYKEDTKELVVAKAGVYYVFFQLELRRVVAGEGSGSVSLALHLQPLRSAAGAAALALTVDLPPASSEARNSAFGFQGRLLHLSAGQRLGVHLHTEARARHAWQLTQGATVLGLFRVTPEIPAGL

SEQ ID NO: 126 - protein, 219 aa, Artificial Sequence
  Description of Artificial Sequence: Synthetic polypeptide
  anti- CD19(8B8-2B11) light chain
DIVMTQTPLSLSVTPGQPASISCKSSQSLETSTGTTYLNWYLQKPGQSPQLLIYRVSKRFSGVPDRFSGSGSGTDFTLKISRVEAEDVGVYYCLQLLEDPYTFGQGTKLEIKRTVAAPSVFIFPPSDEQLKSGTASVVCLLNNFYPREAKVQWKVDNALQSGNSQESVTEQDSKDSTYSLSSTLTLSKADYEKHKVYACEVTHQGLSSPVTKSFNRGEC

SEQ ID NO: 127 - DNA, 2448 bp, Artificial Sequence
  Description of Artificial Sequence: Synthetic polynucleotide
  nucleotide sequence of anti- CD19(8B8-2B11) Fc knob dimeric 4-1BB (71-248) ligand
caggtgcaattggttcaatctggtgctgaagtaaaaaaaccgggcgcttccgttaaagtgagctgcaaagcatctggttacaccttcactgactatatcatgcactgggttcgtcaggccccgggccagggtctggagtggatgggctacattaacccatacaacgacggttccaaatataccgagaaattccagggccgcgtcacgatgaccagcgacacttctatctccaccgcgtacatggaactgtctagactgcgttctgacgacaccgctgtttactattgtgcacgcggtacctactactacggtccacagctgtttgattactggggccaaggtaccacggtgaccgtaagctctgctagcaccaagggcccatcggtcttccccctggcaccctcctccaagagcacctctgggggcacagcggccctgggctgcctggtcaaggactacttccccgaaccggtgacggtgtcgtggaactcaggcgccctgaccagcggcgtgcacaccttcccggctgtcctacagtcctcaggactctactccctcagcagcgtggtgaccgtgccctccagcagcttgggcacccagacctacatctgcaacgtgaatcacaagcccagcaacaccaaggtggacaagaaagttgagcccaaatcttgtgacaaaactcacacatgcccaccgtgcccagcacctgaagctgcagggggaccgtcagtcttcctcttccccccaaaacccaaggacaccctcatgatctcccggacccctgaggtcacatgcgtggtggtggacgtgagccacgaagaccctgaggtcaagttcaactggtacgtggacggcgtggaggtgcataatgccaagacaaagccgcgggaggagcagtacaacagcacgtaccgtgtggtcagcgtcctcaccgtcctgcaccaggactggctgaatggcaaggagtacaagtgcaaggtctccaacaaagccctcggcgcccccatcgagaaaaccatctccaaagccaaagggcagccccgagaaccacaggtgtacaccctgcccccctgcagagatgagctgaccaagaaccaggtgtccctgtggtgtctggtcaagggcttctaccccagcgatatcgccgtggagtgggagagcaacggccagcctgagaacaactacaagaccaccccccctgtgctggacagcgacggcagcttcttcctgtactccaaactgaccgtggacaagagccggtggcagcagggcaacgtgttcagctgcagcgtgatgcacgaggccctgcacaaccactacacccagaagtccctgagcctgagccccggcagagagggccctgagctgagccctgatgatcctgccggactgctggacctgcggcagggaatgtttgcccagctggtggcccagaacgtgctgctgatcgatggccccctgtcctggtacagcgatcctggactggctggcgtgtcactgacaggcggcctgagctacaaagaggacaccaaagaactggtggtggccaaggccggcgtgtactacgtgttctttcagctggaactgcggagagtggtggccggcgaaggatctggctctgtgtctctggccctgcatctgcagcctctgagatctgctgctggcgccgctgctctggcactgacagtggatctgcctcctgccagcagcgaggcccggaatagcgcatttgggtttcaaggcaggctgctgcacctgtctgccggccagaggctgggagtgcatctgcacacagaggccagggctagacacgcctggcagctgacacagggcgctacagtgctgggcctgttcagagtgacccccgagattccagcaggcctgggaggcggcggatctggcggcggaggatctagagaaggacccgagctgtcccccgacgatcccgctgggctgctggatctgagacagggcatgttcgctcagctggtggctcagaatgtgctgctgattgacggacctctgagctggtactccgacccagggctggcaggggtgtccctgactgggggactgtcctacaaagaagatacaaaagaactggtggtggctaaagctggggtgtactatgtgttttttcagctggaactgaggcgggtggtggctggggagggctcaggatctgtgtccctggctctgcatctgcagccactgcgctctgcagcaggggctgcagcactggccctgactgtggacctgcccccagcttcttccgaggccagaaacagcgccttcgggttccaaggacgcctgctgcatctgagcgccggacagcgcctgggagtgcatctgcatactgaagccagagcccggcatgcttggcagctgactcagggggcaactgtgctgggactgtttcgcgtgacacctgagatcccagccgggctc

SEQ ID NO: 128 - protein, 816 aa, Artificial Sequence
  Description of Artificial Sequence: Synthetic polypeptide
  anti- CD19(8B8-2B11) Fc knob dimeric 4-1BB ligand (71-248)
QVQLVQSGAEVKKPGASVKVSCKASGYTFTDYIMHWVRQAPGQGLEWMGYINPYNDGSKYTEKFQGRVTMTSDTSISTAYMELSRLRSDDTAVYYCARGTYYYGPQLFDYWGQGTTVTVSSASTKGPSVFPLAPSSKSTSGGTAALGCLVKDYFPEPVTVSWNSGALTSGVHTFPAVLQSSGLYSLSSVVTVPSSSLGTQTYICNVNHKPSNTKVDKKVEPKSCDKTHTCPPCPAPEAAGGPSVFLFPPKPKDTLMISRTPEVTCVVVDVSHEDPEVKFNWYVDGVEVHNAKTKPREEQYNSTYRVVSVLTVLHQDWLNGKEYKCKVSNKALGAPIEKTISKAKGQPREPQVYTLPPCRDELTKNQVSLWCLVKGFYPSDIAVEWESNGQPENNYKTTPPVLDSDGSFFLYSKLTVDKSRWQQGNVFSCSVMHEALHNHYTQKSLSLSPGREGPELSPDDPAGLLDLRQGMFAQLVAQNVLLIDGPLSWYSDPGLAGVSLTGGLSYKEDTKELVVAKAGVYYVFFQLELRRVVAGEGSGSVSLALHLQPLRSAAGAAALALTVDLPPASSEARNSAFGFQGRLLHLSAGQRLGVHLHTEARARHAWQLTQGATVLGLFRVTPEIPAGLGGGGSGGGGSREGPELSPDDPAGLLDLRQGMFAQLVAQNVLLIDGPLSWYSDPGLAGVSLTGGLSYKEDTKELVVAKAGVYYVFFQLELRRVVAGEGSGSVSLALHLQPLRSAAGAAALALTVDLPPASSEARNSAFGFQGRLLHLSAGQRLGVHLHTEARARHAWQLTQGATVLGLFRVTPEIPAGL

SEQ ID NO: 129 - protein, 6 aa, Artificial Sequence
  Description of Artificial Sequence: Synthetic peptide
  HVR-L1 of anti-CD19 8B8
NSNGNT

SEQ ID NO: 130 - protein, 4 aa, Artificial Sequence
  Description of Artificial Sequence: Synthetic peptide
  HVR-L2 of anti-CD19 8B8
KFNG

SEQ ID NO: 131 - DNA, 681 bp, Artificial Sequence
  Description of Artificial Sequence: Synthetic polynucleotide
  Nucleotide sequence of Fc hole chain with HYRF mutation
gacaaaactcacacatgcccaccgtgcccagcacctgaagctgcagggggaccgtcagtcttcctcttccccccaaaacccaaggacaccctcatgatctcccggacccctgaggtcacatgcgtggtggtggacgtgagccacgaagaccctgaggtcaagttcaactggtacgtggacggcgtggaggtgcataatgccaagacaaagccgcgggaggagcagtacaacagcacgtaccgtgtggtcagcgtcctcaccgtcctgcaccaggactggctgaatggcaaggagtacaagtgcaaggtctccaacaaagccctcggcgcccccatcgagaaaaccatctccaaagccaaagggcagccccgagaaccacaggtgtgcaccctgcccccatcccgggatgagctgaccaagaaccaggtcagcctctcgtgcgcagtcaaaggcttctatcccagcgacatcgccgtggagtgggagagcaatgggcagccggagaacaactacaagaccacgcctcccgtgctggactccgacggctccttcttcctcgtgagcaagctcaccgtggacaagagcaggtggcagcaggggaacgtcttctcatgctccgtgatgcatgaggctctgcacaaccgcttcacgcagaagagcctctccctgtctccgggtaaa

SEQ ID NO: 132 - DNA, 1602 bp, Artificial Sequence
  Description of Artificial Sequence: Synthetic polynucleotide
  Nucleotide sequence of human CD19 antigen Fc knob chain avi tag
cccgaggaacccctggtcgtgaaggtggaagagggcgacaatgccgtgctgcagtgcctgaagggcacctccgatggccctacccagcagctgacctggtccagagagagccccctgaagcccttcctgaagctgtctctgggcctgcctggcctgggcatccatatgaggcctctggccatctggctgttcatcttcaacgtgtcccagcagatgggcggcttctacctgtgtcagcctggccccccatctgagaaggcttggcagcctggctggaccgtgaacgtggaaggatccggcgagctgttccggtggaacgtgtccgatctgggcggcctgggatgcggcctgaagaacagatctagcgagggccccagcagccccagcggcaaactgatgagccccaagctgtacgtgtgggccaaggacagacccgagatctgggagggcgagcctccttgcctgccccctagagacagcctgaaccagagcctgagccaggacctgacaatggcccctggcagcacactgtggctgagctgtggcgtgccacccgactctgtgtctagaggccctctgagctggacccacgtgcaccctaagggccctaagagcctgctgagcctggaactgaaggacgacaggcccgccagagatatgtgggtcatggaaaccggcctgctgctgcctagagccacagcccaggatgccggcaagtactactgccacagaggcaacctgaccatgagcttccacctggaaatcaccgccagacccgtgctgtggcactggctgctgagaacaggcggctggaaggtcgacgctagcggtggtagtccgacacctccgacacccgggggtggttctgcagacaaaactcacacatgcccaccgtgcccagcacctgaagccgcagggggaccgtcagtcttcctcttccccccaaaacccaaggacaccctcatgatctcccggacccctgaggtcacatgcgtggtggtggacgtgagccacgaagaccctgaggtcaagttcaactggtacgtggacggcgtggaggtgcataatgccaagacaaagccgcgggaggagcagtacaacagcacgtaccgtgtggtcagcgtcctcaccgtcctgcaccaggactggctgaatggcaaggagtacaagtgcaaggtctccaacaaagccctcggagcccccatcgagaaaaccatctccaaagccaaagggcagccccgagaaccacaggtgtacaccctgcccccatgccgggatgagctgaccaagaaccaggtcagcctgtggtgcctggtcaaaggcttctatcccagcgacatcgccgtggagtgggagagcaatgggcagccggagaacaactacaagaccacgcctcccgtgctggactccgacggctccttcttcctctacagcaagctcaccgtggacaagagcaggtggcagcaggggaacgtcttctcatgctccgtgatgcatgaggctctgcacaaccactacacgcagaagagcctctccctgtctccgggtaaatccggaggcctgaacgacatcttcgaggcccagaagattgaatggcacgag

SEQ ID NO: 133 - protein, 227 aa, Artificial Sequence
  Description of Artificial Sequence: Synthetic polypeptide
  Fc hole chain with HYRF mutation
DKTHTCPPCPAPEAAGGPSVFLFPPKPKDTLMISRTPEVTCVVVDVSHEDPEVKFNWYVDGVEVHNAKTKPREEQYNSTYRVVSVLTVLHQDWLNGKEYKCKVSNKALGAPIEKTISKAKGQPREPQVCTLPPSRDELTKNQVSLSCAVKGFYPSDIAVEWESNGQPENNYKTTPPVLDSDGSFFLVSKLTVDKSRWQQGNVFSCSVMHEALHNRFTQKSLSLSPGK

SEQ ID NO: 134 - protein, 534 aa, Artificial Sequence
  Description of Artificial Sequence: Synthetic polypeptide
  human CD19 antigen Fc knob chain avi tag
PEEPLVVKVEEGDNAVLQCLKGTSDGPTQQLTWSRESPLKPFLKLSLGLPGLGIHMRPLAIWLFIFNVSQQMGGFYLCQPGPPSEKAWQPGWTVNVEGSGELFRWNVSDLGGLGCGLKNRSSEGPSSPSGKLMSPKLYVWAKDRPEIWEGEPPCLPPRDSLNQSLSQDLTMAPGSTLWLSCGVPPDSVSRGPLSWTHVHPKGPKSLLSLELKDDRPARDMWVMETGLLLPRATAQDAGKYYCHRGNLTMSFHLEITARPVLWHWLLRTGGWKVDASGGSPTPPTPGGGSADKTHTCPPCPAPEAAGGPSVFLFPPKPKDTLMISRTPEVTCVVVDVSHEDPEVKFNWYVDGVEVHNAKTKPREEQYNSTYRVVSVLTVLHQDWLNGKEYKCKVSNKALGAPIEKTISKAKGQPREPQVYTLPPCRDELTKNQVSLWCLVKGFYPSDIAVEWESNGQPENNYKTTPPVLDSDGSFFLYSKLTVDKSRWQQGNVFSCSVMHEALHNHYTQKSLSLSPGKSGGLNDIFEAQKIEWHE

SEQ ID NO: 135 - DNA, 1605 bp, Artificial Sequence
  Description of Artificial Sequence: Synthetic polynucleotide
  Nucleotide sequence of cynomolgus CD19 antigen Fc knob chain avi tag
ccccaggaacccctggtcgtgaaggtggaagagggcgacaatgccgtgctccagtgcctggaaggcacctccgatggccctacacagcagctcgtgtggtgcagagacagccccttcgagcccttcctgaacctgtctctgggcctgcctggcatgggcatcagaatgggccctctgggcatctggctgctgatcttcaacgtgtccaaccagaccggcggcttctacctgtgtcagcctggcctgccaagcgagaaggcttggcagcctggatggaccgtgtccgtggaaggatctggcgagctgttccggtggaacgtgtccgatctgggcggcctgggatgcggcctgaagaacagaagcagcgagggccctagcagccccagcggcaagctgaatagcagccagctgtacgtgtgggccaaggacagacccgagatgtgggagggcgagcctgtgtgtggcccccctagagatagcctgaaccagagcctgagccaggacctgacaatggcccctggcagcacactgtggctgagctgtggcgtgccacccgactctgtgtccagaggccctctgagctggacacacgtgcggccaaagggccctaagagcagcctgctgagcctggaactgaaggacgaccggcccgaccgggatatgtgggtggtggatacaggcctgctgctgaccagagccacagcccaggatgccggcaagtactactgccacagaggcaactggaccaagagcttttacctggaaatcaccgccagacccgccctgtggcactggctgctgagaatcggaggctggaaggtcgacgctagcggtggtagtccgacacctccgacacccgggggtggttctgcagacaaaactcacacatgcccaccgtgcccagcacctgaagccgcagggggaccgtcagtcttcctcttccccccaaaacccaaggacaccctcatgatctcccggacccctgaggtcacatgcgtggtggtggacgtgagccacgaagaccctgaggtcaagttcaactggtacgtggacggcgtggaggtgcataatgccaagacaaagccgcgggaggagcagtacaacagcacgtaccgtgtggtcagcgtcctcaccgtcctgcaccaggactggctgaatggcaaggagtacaagtgcaaggtctccaacaaagccctcggagcccccatcgagaaaaccatctccaaagccaaagggcagccccgagaaccacaggtgtacaccctgcccccatgccgggatgagctgaccaagaaccaggtcagcctgtggtgcctggtcaaaggcttctatcccagcgacatcgccgtggagtgggagagcaatgggcagccggagaacaactacaagaccacgcctcccgtgctggactccgacggctccttcttcctctacagcaagctcaccgtggacaagagcaggtggcagcaggggaacgtcttctcatgctccgtgatgcatgaggctctgcacaaccactacacgcagaagagcctctccctgtctccgggtaaatccggaggcctgaacgacatcttcgaggcccagaagattgaatggcacgag

SEQ ID NO: 136 - protein, 535 aa, Artificial Sequence
  Description of Artificial Sequence: Synthetic polypeptide
  cynomolgus CD19 antigen Fc knob chain avi tag
PQEPLVVKVEEGDNAVLQCLEGTSDGPTQQLVWCRDSPFEPFLNLSLGLPGMGIRMGPLGIWLLIFNVSNQTGGFYLCQPGLPSEKAWQPGWTVSVEGSGELFRWNVSDLGGLGCGLKNRSSEGPSSPSGKLNSSQLYVWAKDRPEMWEGEPVCGPPRDSLNQSLSQDLTMAPGSTLWLSCGVPPDSVSRGPLSWTHVRPKGPKSSLLSLELKDDRPDRDMWVVDTGLLLTRATAQDAGKYYCHRGNWTKSFYLEITARPALWHWLLRIGGWKVDASGGSPTPPTPGGGSADKTHTCPPCPAPEAAGGPSVFLFPPKPKDTLMISRTPEVTCVVVDVSHEDPEVKFNWYVDGVEVHNAKTKPREEQYNSTYRVVSVLTVLHQDWLNGKEYKCKVSNKALGAPIEKTISKAKGQPREPQVYTLPPCRDELTKNQVSLWCLVKGFYPSDIAVEWESNGQPENNYKTTPPVLDSDGSFFLYSKLTVDKSRWQQGNVFSCSVMHEALHNHYTQKSLSLSPGKSGGLNDIFEAQKIEWHE

SEQ ID NO: 137 - DNA, 363 bp, Artificial Sequence
  Description of Artificial Sequence: Synthetic polynucleotide
  Nucleotide sequence CD19 (8B8) VH Parental clone
caagttcaattggttcaatctggtgctgaagtaaaaaaaccgggcgcttccgttaaagtgagctgcaaagcatctggttacaccttcactgactatatcatgcactgggttcgtcaggccccgggccagggtctggagtggatgggctacattaacccatacaacgacggttccaaatataccgagaaattccagggccgcgtcacgatgaccagcgacacttctatctccaccgcgtacatggaactgtctagactgcgttctgacgacaccgctgtttactattgtgcacgcggtacttactactacggttccgccctctttgattactggggccaaggtaccacggtgaccgtaagctct

SEQ ID NO: 138 - DNA, 336 bp, Artificial Sequence
  Description of Artificial Sequence: Synthetic polynucleotide
  Nucleotide sequence CD19 (8B8) VL Parental clone
gatattgttatgactcaaactccactgtctctgtccgtgaccccgggtcagccagcgagcatttcttgcaaatccagccaatctctggaaaactccaacggcaacacgtacctgaactggtatctccagaaaccgggtcagagcccgcagctgctgatctaccgtgtatctaagcgcttctccggcgttcctgatcgtttcagcggttctggatccggcaccgactttactctgaaaatcagccgtgtggaagctgaagacgttggcgtctactattgtctgcagttgacccacgttccgtacaccttcggtcaaggaactaaactggaaattaaa

SEQ ID NO: 139 - DNA, 94 bp, Artificial Sequence
  Description of Artificial Sequence: Synthetic oligonucleotide
  43-45: 40% Y, 6% A/S/T/G/P/D/N/E/Q/V, 49-51: 40% N, 6% A/S/T/Y/G/P/D/E/Q/V, 55-57: 25% S/T/Q/E, 61-63: 25% S/T/Q/E
  modified_base (43)..(45): a, c, t, or g
  modified_base (49)..(51): a, c, t, or g
  modified_base (55)..(57): a, c, t, or g
  modified_base (61)..(63): a, c, t, or g
cagctgcgggctctgacccggtttctggagataccagttcagnnncgtnnngccnnnggannnttccagagattggctggatttgcaagaaatg

SEQ ID NO: 140 - DNA, 99 bp, Artificial Sequence
  Description of Artificial Sequence: Synthetic oligonucleotide
  40-42: 30% R, 20% E, 5% A/S/T/Y/G/P/D/N/Q/V. 49-51: 30% K, 20% S, 5% A/N/T/Y/G/P/D/E/Q/V, 55-57: 40% F, 5% A/S/T/Y/G/P/D/E/Q/V/ I/L, 58-60: 40% S, 6.6% A/T/Y/G/P/D/E/Q/V, 67-69: 50% P, 50% L
  modified_base (40)..(42): a, c, t, or g
  modified_base (49)..(51): a, c, t, or g
  modified_base (55)..(60): a, c, t, or g
  modified_base (67)..(69): a, c, t, or g
ctccagaaaccgggtcagagcccgcagctgctgatctacnnngtatctnnncgcnnnnnnggcgttnnngatcgtttcagcggttctggatccggcacc

SEQ ID NO: 141 - DNA, 99 bp, Artificial Sequence
  Description of Artificial Sequence: Synthetic oligonucleotide
  40-42: 52% H, 4% G/A/S/P/T/N/Y/D/E/Q/V/I, 46-48: 30% I, 15% Y, 5% G/A/S/T/P/N/H/D/E/Q/V, 49-51: 52% Y, 4% G/A/S/P/T/N/H/D/E/Q/V/I, 52-54: 30% D, 15% G, 5% A/S/P/Y/N/H/D/E/Q/V/I, 55-57: 52% T, 4% G/A/S/P/Y/N/H/D/E/Q/V/I, 61-63: 52% T, 4% G/A/S/P/Y/N/H/D/E/Q/V/I
  modified_base (40)..(42): a, c, t, or g
  modified_base (46)..(57): a, c, t, or g
  modified_base (61)..(63): a, c, t, or g
catccactccagaccctggcccggggcctgacgaacccannncatnnnnnnnnnnnngaannngtaaccagatgctttgcagctcactttaacggaagc

SEQ ID NO: 142 - DNA, 99 bp, Artificial Sequence
  Description of Artificial Sequence: Synthetic oligonucleotide
  34-36: 45% Y, 5% others, 40-42: 52% N, 4% others, 46-48: 40% Y, 5% others, 49-51: 30% N, 15% S, 5% others, 52-54: 30% D, 15% G, 5% others, 55-57: 52% G, 4% others, 61-63: 30% K, 15% N, 4% others, 70-72: 30% E, 15% Q, 5% others
  modified_base (34)..(36): a, c, t, or g
  modified_base (40)..(42): a, c, t, or g
  modified_base (46)..(57): a, c, t, or g
  modified_base (61)..(63): a, c, t, or g
  modified_base (70)..(72): a, c, t, or g
caggccccgggccagggtctggagtggatgggcnnnattnnnccannnnnnnnnnnntccnnntataccnnnaaattccagggccgcgtcacgatgacc

SEQ ID NO: 143 - DNA, 33 bp, Artificial Sequence
  Description of Artificial Sequence: Synthetic oligonucleotide
  CD19 H3 reverse constant
cgtcaccggttcggggaagtagtccttgaccag

SEQ ID NO: 144 - DNA, 26 bp, Artificial Sequence
  Description of Artificial Sequence: Synthetic oligonucleotide
  LMB3
caggaaacagctatgaccatgattac

SEQ ID NO: 145 - DNA, 33 bp, Artificial Sequence
  Description of Artificial Sequence: Synthetic oligonucleotide
  CD19 L1 forward constant
tggtatctccagaaaccgggtcagagcccgcag

SEQ ID NO: 146 - DNA, 84 bp, Artificial Sequence
  Description of Artificial Sequence: Synthetic oligonucleotide
  34-36: 52% Y, 4% others, 37-39: 52% P, 4% others, 40-42: 42% V, 10% L, 4% others, 43-45: 52% H, 4% others, 46-48: 42% T, 10% I, 4% others, 49-51: 45% L, 11% G, 4% others
  modified_base (34)..(51): a, c, t, or g
tttaatttccagtttagttccttgaccgaaggtnnnnnnnnnnnnnnnnnnctgcagacaatagtagacgccaacgtcttcagc

SEQ ID NO: 147 - DNA, 35 bp, Artificial Sequence
  Description of Artificial Sequence: Synthetic oligonucleotide
  CD19 L3 forward constant
accttcggtcaaggaactaaactggaaattaaacg

SEQ ID NO: 148 - DNA, 107 bp, Artificial Sequence
  Description of Artificial Sequence: Synthetic polynucleotide
  pos. 59-61: 50% L, 3.8% others, 62-64: 50% A, 4.2% others, 65-67: 50% S, 4.2% others, 68-70: 50% G, 4.2% others, 71-73: 50% Y, 4.2% others, 74-76: 50% Y, 4.2% others, 77-79: 50% Y, 4.2% others, 80-82: 50% T, 4.2% others, 83-85: 50% G, 4.2% others.
  modified_base (54)..(80): a, c, t, or g
ttggtgctagcagagcttacggtcaccgtggtaccttggccccagtaatcaaannnnnnnnnnnnnnnnnnnnnnnnnnngcgtgcacaatagtaaacagcggtgtc

SEQ ID NO: 149 - DNA, 1615 bp, Artificial Sequence
  Description of Artificial Sequence: Synthetic polynucleotide
  SNAP tag human  CD19 ECD- PDGFR DNA
ggccgccgctagcggcatcgactacaaggacgacgatgacaaggccggcatcgatgccatcatggacaaagactgcgaaatgaagcgcaccaccctggatagccctctgggcaagctggaactgtctgggtgcgaacagggcctgcacgagatcaagctgctgggcaaaggaacatctgccgccgacgccgtggaagtgcctgccccagccgccgtgctgggcggaccagagccactgatgcaggccaccgcctggctcaacgcctactttcaccagcctgaggccatcgaggagttccctgtgccagccctgcaccacccagtgttccagcaggagagctttacccgccaggtgctgtggaaactgctgaaagtggtgaagttcggagaggtcatcagctaccagcagctggccgccctggccggcaatcccgccgccaccgccgccgtgaaaaccgccctgagcggaaatcccgtgcccattctgatcccctgccaccgggtggtgtctagctctggcgccgtggggggctacgagggcgggctcgccgtgaaagagtggctgctggcccacgagggccacagactgggcaagcctgggctgggtgatatccccgaggaacccctggtcgtgaaggtggaagagggcgacaatgccgtgctgcagtgcctgaagggcacctccgatggccctacccagcagctgacctggtccagagagagccccctgaagcccttcctgaagctgtctctgggcctgcctggcctgggcatccatatgaggcctctggccatctggctgttcatcttcaacgtgtcccagcagatgggcggcttctacctgtgtcagcctggccccccatctgagaaggcttggcagcctggctggaccgtgaacgtggaaggatccggcgagctgttccggtggaacgtgtccgatctgggcggcctgggatgcggcctgaagaacagatctagcgagggccccagcagccccagcggcaaactgatgagccccaagctgtacgtgtgggccaaggacagacccgagatctgggagggcgagcctccttgcctgccccctagagacagcctgaaccagagcctgagccaggacctgacaatggcccctggcagcacactgtggctgagctgtggcgtgccacccgactctgtgtctagaggccctctgagctggacccacgtgcaccctaagggccctaagagcctgctgagcctggaactgaaggacgacaggcccgccagagatatgtgggtcatggaaaccggcctgctgctgcctagagccacagcccaggatgccggcaagtactactgccacagaggcaacctgaccatgagcttccacctggaaatcaccgccagacccgtgctgtggcactggctgctgagaacaggcggctggaaggtcgacgaacaaaaactcatctcagaagaggatctgaatgctgtgggccaggacacgcaggaggtcatcgtggtgccacactccttgccctttaaggtggtggtgatctcagccatcctggccctggtggtgctcaccatcatctcccttatcatcctcatcatgctttggcagaagaagccacgt

SEQ ID NO: 150 - DNA, 1620 bp, Artificial Sequence
  Description of Artificial Sequence: Synthetic polynucleotide
  SNAP tag cynomolgus  CD19 ECD- PDGFR DNA
ccggccgccgctagcggcatcgactacaaggacgacgatgacaaggccggcatcgatgccatcatggacaaagactgcgaaatgaagcgcaccaccctggatagccctctgggcaagctggaactgtctgggtgcgaacagggcctgcacgagatcaagctgctgggcaaaggaacatctgccgccgacgccgtggaagtgcctgccccagccgccgtgctgggcggaccagagccactgatgcaggccaccgcctggctcaacgcctactttcaccagcctgaggccatcgaggagttccctgtgccagccctgcaccacccagtgttccagcaggagagctttacccgccaggtgctgtggaaactgctgaaagtggtgaagttcggagaggtcatcagctaccagcagctggccgccctggccggcaatcccgccgccaccgccgccgtgaaaaccgccctgagcggaaatcccgtgcccattctgatcccctgccaccgggtggtgtctagctctggcgccgtggggggctacgagggcgggctcgccgtgaaagagtggctgctggcccacgagggccacagactgggcaagcctgggctgggtgatatcccccaggaacccctggtcgtgaaggtggaagagggcgacaatgccgtgctccagtgtctcgagggcacctccgatggccctacacagcagctcgtgtggtgcagagacagccccttcgagcccttcctgaacctgtctctgggcctgcctggcatgggcatcagaatgggccctctgggcatctggctgctgatcttcaacgtgtccaaccagaccggcggcttctacctgtgtcagcctggcctgccaagcgagaaggcttggcagcctggatggaccgtgtccgtggaaggatctggcgagctgttccggtggaacgtgtccgatctgggcggcctgggatgcggcctgaagaacagaagcagcgagggccctagcagccccagcggcaagctgaatagcagccagctgtacgtgtgggccaaggacagacccgagatgtgggagggcgagcctgtgtgtggcccccctagagatagcctgaaccagagcctgagccaggacctgacaatggcccctggcagcacactgtggctgagctgtggcgtgccacccgactctgtgtccagaggccctctgagctggacacacgtgcggcctaagggccctaagagcagcctgctgagcctggaactgaaggacgaccggcccgaccgggatatgtgggtggtggatacaggcctgctgctgaccagagccacagcccaggatgccggcaagtactactgccacagaggcaactggaccaagagcttttacctggaaatcaccgccagacccgccctgtggcactggctgctgagaatcggaggctggaaggtcgacgagcagaagctgatctccgaagaggacctgaacgccgtgggccaggatacccaggaagtgatcgtggtgccccacagcctgcccttcaaggtggtcgtgatcagcgccattctggccctggtggtgctgaccatcatcagcctgatcatcctgattatgctgtggcagaaaaagccccgc

SEQ ID NO: 151 - protein, 539 aa, Artificial Sequence
  Description of Artificial Sequence: Synthetic polypeptide
  SNAP tag human  CD19 ECD- PDGFR
PAAASGIDYKDDDDKAGIDAIMDKDCEMKRTTLDSPLGKLELSGCEQGLHEIKLLGKGTSAADAVEVPAPAAVLGGPEPLMQATAWLNAYFHQPEAIEEFPVPALHHPVFQQESFTRQVLWKLLKVVKFGEVISYQQLAALAGNPAATAAVKTALSGNPVPILIPCHRVVSSSGAVGGYEGGLAVKEWLLAHEGHRLGKPGLGDIPEEPLVVKVEEGDNAVLQCLKGTSDGPTQQLTWSRESPLKPFLKLSLGLPGLGIHMRPLAIWLFIFNVSQQMGGFYLCQPGPPSEKAWQPGWTVNVEGSGELFRWNVSDLGGLGCGLKNRSSEGPSSPSGKLMSPKLYVWAKDRPEIWEGEPPCLPPRDSLNQSLSQDLTMAPGSTLWLSCGVPPDSVSRGPLSWTHVHPKGPKSLLSLELKDDRPARDMWVMETGLLLPRATAQDAGKYYCHRGNLTMSFHLEITARPVLWHWLLRTGGWKVDEQKLISEEDLNAVGQDTQEVIVVPHSLPFKVVVISAILALVVLTIISLIILIMLWQKKPR

SEQ ID NO: 152 - protein, 540 aa, Artificial Sequence
  Description of Artificial Sequence: Synthetic polypeptide
  SNAP tag cynomolgus  CD19 ECD- PDGFR
PAAASGIDYKDDDDKAGIDAIMDKDCEMKRTTLDSPLGKLELSGCEQGLHEIKLLGKGTSAADAVEVPAPAAVLGGPEPLMQATAWLNAYFHQPEAIEEFPVPALHHPVFQQESFTRQVLWKLLKVVKFGEVISYQQLAALAGNPAATAAVKTALSGNPVPILIPCHRVVSSSGAVGGYEGGLAVKEWLLAHEGHRLGKPGLGDIPQEPLVVKVEEGDNAVLQCLEGTSDGPTQQLVWCRDSPFEPFLNLSLGLPGMGIRMGPLGIWLLIFNVSNQTGGFYLCQPGLPSEKAWQPGWTVSVEGSGELFRWNVSDLGGLGCGLKNRSSEGPSSPSGKLNSSQLYVWAKDRPEMWEGEPVCGPPRDSLNQSLSQDLTMAPGSTLWLSCGVPPDSVSRGPLSWTHVRPKGPKSSLLSLELKDDRPDRDMWVVDTGLLLTRATAQDAGKYYCHRGNWTKSFYLEITARPALWHWLLRIGGWKVDEQKLISEEDLNAVGQDTQEVIVVPHSLPFKVVVISAILALVVLTIISLIILIMLWQKKPR

SEQ ID NO: 153 - DNA, 1914 bp, Artificial Sequence
  Description of Artificial Sequence: Synthetic polynucleotide
  nucleotide sequence of anti- CEA(T84.66-LCHA) Fc knob monomeric 4-1BB (71-248) ligand
caggtgcagctggtgcagtctggcgccgaagtgaagaaacccggcagcagcgtgaaggtgtcctgcaaggccagcggcttcaacatcaaggacacctacatgcactgggtgcgccaggcccctggacagggactggaatggatgggcagaatcgaccccgccaacggcaacagcaaatacgtgcccaagttccagggcagagtgaccatcaccgccgacaccagcacctccaccgcctacatggaactgagcagcctgcggagcgaggacaccgccgtgtactactgtgcccccttcggctactacgtgtccgactacgccatggcctattggggccagggcacactcgtgaccgtgtcctctgctagcaccaagggcccatcggtcttccccctggcaccctcctccaagagcacctctgggggcacagcggccctgggctgcctggtcaaggactacttccccgaaccggtgacggtgtcgtggaactcaggcgccctgaccagcggcgtgcacaccttcccggctgtcctacagtcctcaggactctactccctcagcagcgtggtgaccgtgccctccagcagcttgggcacccagacctacatctgcaacgtgaatcacaagcccagcaacaccaaggtggacaagaaagttgagcccaaatcttgtgacaaaactcacacatgcccaccgtgcccagcacctgaagctgcagggggaccgtcagtcttcctcttccccccaaaacccaaggacaccctcatgatctcccggacccctgaggtcacatgcgtggtggtggacgtgagccacgaagaccctgaggtcaagttcaactggtacgtggacggcgtggaggtgcataatgccaagacaaagccgcgggaggagcagtacaacagcacgtaccgtgtggtcagcgtcctcaccgtcctgcaccaggactggctgaatggcaaggagtacaagtgcaaggtctccaacaaagccctcggcgcccccatcgagaaaaccatctccaaagccaaagggcagccccgagaaccacaggtgtacaccctgcccccctgcagagatgagctgaccaagaaccaggtgtccctgtggtgtctggtcaagggcttctaccccagcgatatcgccgtggagtgggagagcaacggccagcctgagaacaactacaagaccaccccccctgtgctggacagcgacggcagcttcttcctgtactccaaactgaccgtggacaagagccggtggcagcagggcaacgtgttcagctgcagcgtgatgcacgaggccctgcacaaccactacacccagaagtccctgagcctgagccccggcggaggcggcggaagcggaggaggaggatccagagagggccctgagctgagccctgatgatcctgccggactgctggacctgcggcagggaatgtttgcccagctggtggcccagaacgtgctgctgatcgatggccccctgtcctggtacagcgatcctggactggctggcgtgtcactgacaggcggcctgagctacaaagaggacaccaaagaactggtggtggccaaggccggcgtgtactacgtgttctttcagctggaactgcggagagtggtggccggcgaaggatctggctctgtgtctctggccctgcatctgcagcctctgagatctgctgctggcgccgctgctctggcactgacagtggatctgcctcctgccagcagcgaggcccggaatagcgcatttgggtttcaaggcaggctgctgcacctgtctgccggccagaggctgggagtgcatctgcacacagaggccagggctagacacgcctggcagctgacacagggcgctacagtgctgggcctgttcagagtgacccccgagattcctgccgggctc

SEQ ID NO: 154 - DNA, 654 bp, Artificial Sequence
  Description of Artificial Sequence: Synthetic polynucleotide
  nucleotide sequence of anti- CEA(T84.66-LCHA) light chain
gagatcgtgctgacccagagccctgccaccctgtcactgtctccaggcgagagagccaccctgagctgtagagccggcgagagcgtggacatcttcggcgtgggatttctgcactggtatcagcagaagcccggccaggcccccagactgctgatctacagagccagcaaccgggccacaggcatccccgccagattttctggctctggcagcggcaccgacttcaccctgacaatcagcagcctggaacccgaggacttcgccgtgtactactgccagcagaccaacgaggacccctacacctttggccagggcaccaagctggaaatcaagcgtacggtggctgcaccatctgtcttcatcttcccgccatctgatgagcagttgaaatctggaactgcctctgttgtgtgcctgctgaataacttctatcccagagaggccaaagtacagtggaaggtggataacgccctccaatcgggtaactcccaggagagtgtcacagagcaggacagcaaggacagcacctacagcctcagcagcaccctgacgctgagcaaagcagactacgagaaacacaaagtctacgcctgcgaagtcacccatcagggcctgagctcgcccgtcacaaagagcttcaacaggggagagtgt

SEQ ID NO: 155 - protein, 638 aa, Artificial Sequence
  Description of Artificial Sequence: Synthetic polypeptide
  anti- CEA (T84.66-LCHA) Fc knob monomeric 4-1-BB (71-248) ligand
QVQLVQSGAEVKKPGSSVKVSCKASGFNIKDTYMHWVRQAPGQGLEWMGRIDPANGNSKYVPKFQGRVTITADTSTSTAYMELSSLRSEDTAVYYCAPFGYYVSDYAMAYWGQGTLVTVSSASTKGPSVFPLAPSSKSTSGGTAALGCLVKDYFPEPVTVSWNSGALTSGVHTFPAVLQSSGLYSLSSVVTVPSSSLGTQTYICNVNHKPSNTKVDKKVEPKSCDKTHTCPPCPAPEAAGGPSVFLFPPKPKDTLMISRTPEVTCVVVDVSHEDPEVKFNWYVDGVEVHNAKTKPREEQYNSTYRVVSVLTVLHQDWLNGKEYKCKVSNKALGAPIEKTISKAKGQPREPQVYTLPPCRDELTKNQVSLWCLVKGFYPSDIAVEWESNGQPENNYKTTPPVLDSDGSFFLYSKLTVDKSRWQQGNVFSCSVMHEALHNHYTQKSLSLSPGGGGGSGGGGSREGPELSPDDPAGLLDLRQGMFAQLVAQNVLLIDGPLSWYSDPGLAGVSLTGGLSYKEDTKELVVAKAGVYYVFFQLELRRVVAGEGSGSVSLALHLQPLRSAAGAAALALTVDLPPASSEARNSAFGFQGRLLHLSAGQRLGVHLHTEARARHAWQLTQGATVLGLFRVTPEIPAGL

SEQ ID NO: 156 - protein, 218 aa, Artificial Sequence
  Description of Artificial Sequence: Synthetic polypeptide
  anti- CEA(T84.66-LCHA) light chain
EIVLTQSPATLSLSPGERATLSCRAGESVDIFGVGFLHWYQQKPGQAPRLLIYRASNRATGIPARFSGSGSGTDFTLTISSLEPEDFAVYYCQQTNEDPYTFGQGTKLEIKRTVAAPSVFIFPPSDEQLKSGTASVVCLLNNFYPREAKVQWKVDNALQSGNSQESVTEQDSKDSTYSLSSTLTLSKADYEKHKVYACEVTHQGLSSPVTKSFNRGEC

SEQ ID NO: 157 - DNA, 2448 bp, Artificial Sequence
  Description of Artificial Sequence: Synthetic polynucleotide
  nucleotide sequence of anti- CEA(T84.66-LCHA) Fc knob dimeric 4-1BB (71-248) ligand
caggtgcagctggtgcagtctggcgccgaagtgaagaaacccggcagcagcgtgaaggtgtcctgcaaggccagcggcttcaacatcaaggacacctacatgcactgggtgcgccaggcccctggacagggactggaatggatgggcagaatcgaccccgccaacggcaacagcaaatacgtgcccaagttccagggcagagtgaccatcaccgccgacaccagcacctccaccgcctacatggaactgagcagcctgcggagcgaggacaccgccgtgtactactgtgcccccttcggctactacgtgtccgactacgccatggcctattggggccagggcacactcgtgaccgtgtcctctgctagcaccaagggcccatcggtcttccccctggcaccctcctccaagagcacctctgggggcacagcggccctgggctgcctggtcaaggactacttccccgaaccggtgacggtgtcgtggaactcaggcgccctgaccagcggcgtgcacaccttcccggctgtcctacagtcctcaggactctactccctcagcagcgtggtgaccgtgccctccagcagcttgggcacccagacctacatctgcaacgtgaatcacaagcccagcaacaccaaggtggacaagaaagttgagcccaaatcttgtgacaaaactcacacatgcccaccgtgcccagcacctgaagctgcagggggaccgtcagtcttcctcttccccccaaaacccaaggacaccctcatgatctcccggacccctgaggtcacatgcgtggtggtggacgtgagccacgaagaccctgaggtcaagttcaactggtacgtggacggcgtggaggtgcataatgccaagacaaagccgcgggaggagcagtacaacagcacgtaccgtgtggtcagcgtcctcaccgtcctgcaccaggactggctgaatggcaaggagtacaagtgcaaggtctccaacaaagccctcggcgcccccatcgagaaaaccatctccaaagccaaagggcagccccgagaaccacaggtgtacaccctgcccccctgcagagatgagctgaccaagaaccaggtgtccctgtggtgtctggtcaagggcttctaccccagcgatatcgccgtggagtgggagagcaacggccagcctgagaacaactacaagaccaccccccctgtgctggacagcgacggcagcttcttcctgtactccaaactgaccgtggacaagagccggtggcagcagggcaacgtgttcagctgcagcgtgatgcacgaggccctgcacaaccactacacccagaagtccctgagcctgagccccggcagagagggccctgagctgagccctgatgatcctgccggactgctggacctgcggcagggaatgtttgcccagctggtggcccagaacgtgctgctgatcgatggccccctgtcctggtacagcgatcctggactggctggcgtgtcactgacaggcggcctgagctacaaagaggacaccaaagaactggtggtggccaaggccggcgtgtactacgtgttctttcagctggaactgcggagagtggtggccggcgaaggatctggctctgtgtctctggccctgcatctgcagcctctgagatctgctgctggcgccgctgctctggcactgacagtggatctgcctcctgccagcagcgaggcccggaatagcgcatttgggtttcaaggcaggctgctgcacctgtctgccggccagaggctgggagtgcatctgcacacagaggccagggctagacacgcctggcagctgacacagggcgctacagtgctgggcctgttcagagtgacccccgagattccagcaggcctgggaggcggcggatctggcggcggaggatctagagaaggacccgagctgtcccccgacgatcccgctgggctgctggatctgagacagggcatgttcgctcagctggtggctcagaatgtgctgctgattgacggacctctgagctggtactccgacccagggctggcaggggtgtccctgactgggggactgtcctacaaagaagatacaaaagaactggtggtggctaaagctggggtgtactatgtgttttttcagctggaactgaggcgggtggtggctggggagggctcaggatctgtgtccctggctctgcatctgcagccactgcgctctgcagcaggggctgcagcactggccctgactgtggacctgcccccagcttcttccgaggccagaaacagcgccttcgggttccaaggacgcctgctgcatctgagcgccggacagcgcctgggagtgcatctgcatactgaagccagagcccggcatgcttggcagctgactcagggggcaactgtgctgggactgtttcgcgtgacacctgagatcccagccgggctc

SEQ ID NO: 158 - protein, 816 aa, Artificial Sequence
  Description of Artificial Sequence: Synthetic polypeptide
  anti- CEA(T84.66-LCHA) Fc knob dimeric 4-1BB (71-248) ligand
QVQLVQSGAEVKKPGSSVKVSCKASGFNIKDTYMHWVRQAPGQGLEWMGRIDPANGNSKYVPKFQGRVTITADTSTSTAYMELSSLRSEDTAVYYCAPFGYYVSDYAMAYWGQGTLVTVSSASTKGPSVFPLAPSSKSTSGGTAALGCLVKDYFPEPVTVSWNSGALTSGVHTFPAVLQSSGLYSLSSVVTVPSSSLGTQTYICNVNHKPSNTKVDKKVEPKSCDKTHTCPPCPAPEAAGGPSVFLFPPKPKDTLMISRTPEVTCVVVDVSHEDPEVKFNWYVDGVEVHNAKTKPREEQYNSTYRVVSVLTVLHQDWLNGKEYKCKVSNKALGAPIEKTISKAKGQPREPQVYTLPPCRDELTKNQVSLWCLVKGFYPSDIAVEWESNGQPENNYKTTPPVLDSDGSFFLYSKLTVDKSRWQQGNVFSCSVMHEALHNHYTQKSLSLSPGREGPELSPDDPAGLLDLRQGMFAQLVAQNVLLIDGPLSWYSDPGLAGVSLTGGLSYKEDTKELVVAKAGVYYVFFQLELRRVVAGEGSGSVSLALHLQPLRSAAGAAALALTVDLPPASSEARNSAFGFQGRLLHLSAGQRLGVHLHTEARARHAWQLTQGATVLGLFRVTPEIPAGLGGGGSGGGGSREGPELSPDDPAGLLDLRQGMFAQLVAQNVLLIDGPLSWYSDPGLAGVSLTGGLSYKEDTKELVVAKAGVYYVFFQLELRRVVAGEGSGSVSLALHLQPLRSAAGAAALALTVDLPPASSEARNSAFGFQGRLLHLSAGQRLGVHLHTEARARHAWQLTQGATVLGLFRVTPEIPAGL

SEQ ID NO: 159 - protein, 140 aa, Artificial Sequence
  Description of Artificial Sequence: Synthetic polypeptide
  anti-mu CEA T84.66 VH
MKCSWVIFFLMAVVTGVNSEVQLQQSGAELVEPGASVKLSCTASGFNIKDTYMHWVKQRPEQGLEWIGRIDPANGNSKYVPKFQGKATITADTSSNTAYLQLTSLTSEDTAVYYCAPFGYYVSDYAMAYWGQGTSVTVSS

SEQ ID NO: 160 - protein, 131 aa, Artificial Sequence
  Description of Artificial Sequence: Synthetic polypeptide
  anti-mu CEA T84.66 VL
METDTLLLWVLLLWVPGSTGDIVLTQSPASLAVSLGQRATMSCRAGESVDIFGVGFLHWYQQKPGQPPKLLIYRASNLESGIPVRFSGTGSRTDFTLIIDPVEADDVATYYCQQTNEDPYTFGGGTKLEIK

SEQ ID NO: 161 - DNA, 392 bp, Artificial Sequence
  Description of Artificial Sequence: Synthetic polynucleotide
  heavy chain framework acceptor sequence
taaggggcttcctagtcctaaggctgaggaagggatcctggtttagttaaagaggattttattcacccctgtgtcctctccacaggtgtccagtcccaggtccagctggtgcaatctggggctgaggtgaagaagcctgggtcctcggtgaaggtctcctgcaaggcttctggaggcaccttcagcagctatactatcagctgggtgcgacaggcccctggacaagggcttgagtggatgggaaggatcatccctatccttggtacagcaaactacgcacagaagttccagggcagagtcacgattaccgcggacaaatccacgagcacagcctacatggagctgagcagcctgagatctgaggacacggccgtgtattactgtgcgagaga

SEQ ID NO: 162 - DNA, 797 bp, Artificial Sequence
  Description of Artificial Sequence: Synthetic polynucleotide
  light chain framework acceptor sequence
ctgcagctggaagctcagctcccacccagctgctttgcatgtccctcccagctgccctaccttccagagcccatatcaatgcctgtgtcagagccctggggaggaactgctcagttaggacccagagggaaccatggaagccccagctcagcttctcttcctcctgctactctggctcccaggtgaggggaacatgaggtggttttgcacattagtgaaaactcttgccacctctgctcagcaagaaatataattaaaattcaaagtatatcaacaattttggctctactcaaagacagttggtttgatcttgattacatgagtgcatttctgttttatttccaatttcagataccaccggagaaattgtgttgacacagtctccagccaccctgtctttgtctccaggggaaagagccaccctctcctgcagggccagtcagagtgttagcagctacttagcctggtaccaacagaaacctggccaggctcccaggctcctcatctatgatgcatccaacagggccactggcatcccagccaggttcagtggcagtgggtctgggacagacttcactctcaccatcagcagcctagagcctgaagattttgcagtttattactgtcagcagcgtagcaactggcctcccacagtgattccacatgaaacaaaaaccccaacaagaccatcagtgtttactagattattataccagctgcttcctttacagacagctagtggggtggccactcagtgttagcatctcagctctatttggccattttggagttcaagt

SEQ ID NO: 163 - protein, 121 aa, Artificial Sequence
  Description of Artificial Sequence: Synthetic polypeptide
  Parental CEA binder VH
EVQLQQSGAELVEPGASVKLSCTASGFNIKDTYMHWVKQRPEQGLEWIGRIDPANGNSKYVPKFQGKATITADTSSNTAYLQLTSLTSEDTAVYYCAPFGYYVSDYAMAYWGQGTSVTVSS

SEQ ID NO: 164 - protein, 111 aa, Artificial Sequence
  Description of Artificial Sequence: Synthetic polypeptide
  Parental CEA binder VL
DIVLTQSPASLAVSLGQRATMSCRAGESVDIFGVGFLHWYQQKPGQPPKLLIYRASNLESGIPVRFSGTGSRTDFTLIIDPVEADDVATYYCQQTNEDPYTFGGGTKLEIK

SEQ ID NO: 165 - DNA, 1896 bp, Artificial Sequence
  Description of Artificial Sequence: Synthetic polynucleotide
  nucleotide sequence of DP47 Fc knob monomeric 4-1BB (71-248) ligand
gaggtgcaattgttggagtctgggggaggcttggtacagcctggggggtccctgagactctcctgtgcagcctccggattcacctttagcagttatgccatgagctgggtccgccaggctccagggaaggggctggagtgggtctcagctattagtggtagtggtggtagcacatactacgcagactccgtgaagggccggttcaccatctccagagacaattccaagaacacgctgtatctgcagatgaacagcctgagagccgaggacacggccgtatattactgtgcgaaaggcagcggatttgactactggggccaaggaaccctggtcaccgtctcgagtgctagcaccaagggcccatcggtcttccccctggcaccctcctccaagagcacctctgggggcacagcggccctgggctgcctggtcaaggactacttccccgaaccggtgacggtgtcgtggaactcaggcgccctgaccagcggcgtgcacaccttcccggctgtcctacagtcctcaggactctactccctcagcagcgtggtgaccgtgccctccagcagcttgggcacccagacctacatctgcaacgtgaatcacaagcccagcaacaccaaggtggacaagaaagttgagcccaaatcttgtgacaaaactcacacatgcccaccgtgcccagcacctgaagctgcagggggaccgtcagtcttcctcttccccccaaaacccaaggacaccctcatgatctcccggacccctgaggtcacatgcgtggtggtggacgtgagccacgaagaccctgaggtcaagttcaactggtacgtggacggcgtggaggtgcataatgccaagacaaagccgcgggaggagcagtacaacagcacgtaccgtgtggtcagcgtcctcaccgtcctgcaccaggactggctgaatggcaaggagtacaagtgcaaggtctccaacaaagccctcggcgcccccatcgagaaaaccatctccaaagccaaagggcagccccgagaaccacaggtgtacaccctgcccccctgcagagatgagctgaccaagaaccaggtgtccctgtggtgtctggtcaagggcttctaccccagcgatatcgccgtggagtgggagagcaacggccagcctgagaacaactacaagaccaccccccctgtgctggacagcgacggcagcttcttcctgtactccaaactgaccgtggacaagagccggtggcagcagggcaacgtgttcagctgcagcgtgatgcacgaggccctgcacaaccactacacccagaagtccctgagcctgagccccggcggaggcggcggaagcggaggaggaggatccagagagggccctgagctgagccctgatgatcctgccggactgctggacctgcggcagggaatgtttgcccagctggtggcccagaacgtgctgctgatcgatggccccctgtcctggtacagcgatcctggactggctggcgtgtcactgacaggcggcctgagctacaaagaggacaccaaagaactggtggtggccaaggccggcgtgtactacgtgttctttcagctggaactgcggagagtggtggccggcgaaggatctggctctgtgtctctggccctgcatctgcagcctctgagatctgctgctggcgccgctgctctggcactgacagtggatctgcctcctgccagcagcgaggcccggaatagcgcatttgggtttcaaggcaggctgctgcacctgtctgccggccagaggctgggagtgcatctgcacacagaggccagggctagacacgcctggcagctgacacagggcgctacagtgctgggcctgttcagagtgacccccgagattcctgccgggctc

SEQ ID NO: 166 - DNA, 645 bp, Artificial Sequence
  Description of Artificial Sequence: Synthetic polynucleotide
  nucleotide sequence of DP47 light chain
gaaatcgtgttaacgcagtctccaggcaccctgtctttgtctccaggggaaagagccaccctctcttgcagggccagtcagagtgttagcagcagctacttagcctggtaccagcagaaacctggccaggctcccaggctcctcatctatggagcatccagcagggccactggcatcccagacaggttcagtggcagtggatccgggacagacttcactctcaccatcagcagactggagcctgaagattttgcagtgtattactgtcagcagtatggtagctcaccgctgacgttcggccaggggaccaaagtggaaatcaaacgtacggtggctgcaccatctgtcttcatcttcccgccatctgatgagcagttgaaatctggaactgcctctgttgtgtgcctgctgaataacttctatcccagagaggccaaagtacagtggaaggtggataacgccctccaatcgggtaactcccaggagagtgtcacagagcaggacagcaaggacagcacctacagcctcagcagcaccctgacgctgagcaaagcagactacgagaaacacaaagtctacgcctgcgaagtcacccatcagggcctgagctcgcccgtcacaaagagcttcaacaggggagagtgt

SEQ ID NO: 167 - protein, 632 aa, Artificial Sequence
  Description of Artificial Sequence: Synthetic polypeptide
  DP47 Fc knob monomeric 4-1-BB (71-248) ligand
EVQLLESGGGLVQPGGSLRLSCAASGFTFSSYAMSWVRQAPGKGLEWVSAISGSGGSTYYADSVKGRFTISRDNSKNTLYLQMNSLRAEDTAVYYCAKGSGFDYWGQGTLVTVSSASTKGPSVFPLAPSSKSTSGGTAALGCLVKDYFPEPVTVSWNSGALTSGVHTFPAVLQSSGLYSLSSVVTVPSSSLGTQTYICNVNHKPSNTKVDKKVEPKSCDKTHTCPPCPAPEAAGGPSVFLFPPKPKDTLMISRTPEVTCVVVDVSHEDPEVKFNWYVDGVEVHNAKTKPREEQYNSTYRVVSVLTVLHQDWLNGKEYKCKVSNKALGAPIEKTISKAKGQPREPQVYTLPPCRDELTKNQVSLWCLVKGFYPSDIAVEWESNGQPENNYKTTPPVLDSDGSFFLYSKLTVDKSRWQQGNVFSCSVMHEALHNHYTQKSLSLSPGGGGGSGGGGSREGPELSPDDPAGLLDLRQGMFAQLVAQNVLLIDGPLSWYSDPGLAGVSLTGGLSYKEDTKELVVAKAGVYYVFFQLELRRVVAGEGSGSVSLALHLQPLRSAAGAAALALTVDLPPASSEARNSAFGFQGRLLHLSAGQRLGVHLHTEARARHAWQLTQGATVLGLFRVTPEIPAGL

SEQ ID NO: 168 - protein, 215 aa, Artificial Sequence
  Description of Artificial Sequence: Synthetic polypeptide
  DP47 light chain
EIVLTQSPGTLSLSPGERATLSCRASQSVSSSYLAWYQQKPGQAPRLLIYGASSRATGIPDRFSGSGSGTDFTLTISRLEPEDFAVYYCQQYGSSPLTFGQGTKVEIKRTVAAPSVFIFPPSDEQLKSGTASVVCLLNNFYPREAKVQWKVDNALQSGNSQESVTEQDSKDSTYSLSSTLTLSKADYEKHKVYACEVTHQGLSSPVTKSFNRGEC

SEQ ID NO: 169 - DNA, 2430 bp, Artificial Sequence
  Description of Artificial Sequence: Synthetic polynucleotide
  nucleotide sequence of DP47 Fc knob dimeric 4-1BBL (71-248)
gaggtgcaattgttggagtctgggggaggcttggtacagcctggggggtccctgagactctcctgtgcagcctccggattcacctttagcagttatgccatgagctgggtccgccaggctccagggaaggggctggagtgggtctcagctattagtggtagtggtggtagcacatactacgcagactccgtgaagggccggttcaccatctccagagacaattccaagaacacgctgtatctgcagatgaacagcctgagagccgaggacacggccgtatattactgtgcgaaaggcagcggatttgactactggggccaaggaaccctggtcaccgtctcgagtgctagcaccaagggcccatcggtcttccccctggcaccctcctccaagagcacctctgggggcacagcggccctgggctgcctggtcaaggactacttccccgaaccggtgacggtgtcgtggaactcaggcgccctgaccagcggcgtgcacaccttcccggctgtcctacagtcctcaggactctactccctcagcagcgtggtgaccgtgccctccagcagcttgggcacccagacctacatctgcaacgtgaatcacaagcccagcaacaccaaggtggacaagaaagttgagcccaaatcttgtgacaaaactcacacatgcccaccgtgcccagcacctgaagctgcagggggaccgtcagtcttcctcttccccccaaaacccaaggacaccctcatgatctcccggacccctgaggtcacatgcgtggtggtggacgtgagccacgaagaccctgaggtcaagttcaactggtacgtggacggcgtggaggtgcataatgccaagacaaagccgcgggaggagcagtacaacagcacgtaccgtgtggtcagcgtcctcaccgtcctgcaccaggactggctgaatggcaaggagtacaagtgcaaggtctccaacaaagccctcggcgcccccatcgagaaaaccatctccaaagccaaagggcagccccgagaaccacaggtgtacaccctgcccccctgcagagatgagctgaccaagaaccaggtgtccctgtggtgtctggtcaagggcttctaccccagcgatatcgccgtggagtgggagagcaacggccagcctgagaacaactacaagaccaccccccctgtgctggacagcgacggcagcttcttcctgtactccaaactgaccgtggacaagagccggtggcagcagggcaacgtgttcagctgcagcgtgatgcacgaggccctgcacaaccactacacccagaagtccctgagcctgagccccggcagagagggccctgagctgagccctgatgatcctgccggactgctggacctgcggcagggaatgtttgcccagctggtggcccagaacgtgctgctgatcgatggccccctgtcctggtacagcgatcctggactggctggcgtgtcactgacaggcggcctgagctacaaagaggacaccaaagaactggtggtggccaaggccggcgtgtactacgtgttctttcagctggaactgcggagagtggtggccggcgaaggatctggctctgtgtctctggccctgcatctgcagcctctgagatctgctgctggcgccgctgctctggcactgacagtggatctgcctcctgccagcagcgaggcccggaatagcgcatttgggtttcaaggcaggctgctgcacctgtctgccggccagaggctgggagtgcatctgcacacagaggccagggctagacacgcctggcagctgacacagggcgctacagtgctgggcctgttcagagtgacccccgagattccagcaggcctgggaggcggcggatctggcggcggaggatctagagaaggacccgagctgtcccccgacgatcccgctgggctgctggatctgagacagggcatgttcgctcagctggtggctcagaatgtgctgctgattgacggacctctgagctggtactccgacccagggctggcaggggtgtccctgactgggggactgtcctacaaagaagatacaaaagaactggtggtggctaaagctggggtgtactatgtgttttttcagctggaactgaggcgggtggtggctggggagggctcaggatctgtgtccctggctctgcatctgcagccactgcgctctgcagcaggggctgcagcactggccctgactgtggacctgcccccagcttcttccgaggccagaaacagcgccttcgggttccaaggacgcctgctgcatctgagcgccggacagcgcctgggagtgcatctgcatactgaagccagagcccggcatgcttggcagctgactcagggggcaactgtgctgggactgtttcgcgtgacacctgagatcccagccgggctc

SEQ ID NO: 170 - protein, 810 aa, Artificial Sequence
  Description of Artificial Sequence: Synthetic polypeptide
  DP47 Fc knob dimeric 4-1BBL (71-248)
EVQLLESGGGLVQPGGSLRLSCAASGFTFSSYAMSWVRQAPGKGLEWVSAISGSGGSTYYADSVKGRFTISRDNSKNTLYLQMNSLRAEDTAVYYCAKGSGFDYWGQGTLVTVSSASTKGPSVFPLAPSSKSTSGGTAALGCLVKDYFPEPVTVSWNSGALTSGVHTFPAVLQSSGLYSLSSVVTVPSSSLGTQTYICNVNHKPSNTKVDKKVEPKSCDKTHTCPPCPAPEAAGGPSVFLFPPKPKDTLMISRTPEVTCVVVDVSHEDPEVKFNWYVDGVEVHNAKTKPREEQYNSTYRVVSVLTVLHQDWLNGKEYKCKVSNKALGAPIEKTISKAKGQPREPQVYTLPPCRDELTKNQVSLWCLVKGFYPSDIAVEWESNGQPENNYKTTPPVLDSDGSFFLYSKLTVDKSRWQQGNVFSCSVMHEALHNHYTQKSLSLSPGREGPELSPDDPAGLLDLRQGMFAQLVAQNVLLIDGPLSWYSDPGLAGVSLTGGLSYKEDTKELVVAKAGVYYVFFQLELRRVVAGEGSGSVSLALHLQPLRSAAGAAALALTVDLPPASSEARNSAFGFQGRLLHLSAGQRLGVHLHTEARARHAWQLTQGATVLGLFRVTPEIPAGLGGGGSGGGGSREGPELSPDDPAGLLDLRQGMFAQLVAQNVLLIDGPLSWYSDPGLAGVSLTGGLSYKEDTKELVVAKAGVYYVFFQLELRRVVAGEGSGSVSLALHLQPLRSAAGAAALALTVDLPPASSEARNSAFGFQGRLLHLSAGQRLGVHLHTEARARHAWQLTQGATVLGLFRVTPEIPAGL

SEQ ID NO: 171 - DNA, 2466 bp, Artificial Sequence
  Description of Artificial Sequence: Synthetic polynucleotide
  nucleotide sequence of anti-FAP(4B9) Fc hole dimeric 4-1BB ligand (71-248) chain
gaggtgcagctgctcgaaagcggcggaggactggtgcagcctggcggcagcctgagactgtcttgcgccgccagcggcttcaccttcagcagctacgccatgagctgggtccgccaggcccctggcaagggactggaatgggtgtccgccatcatcggctctggcgccagcacctactacgccgacagcgtgaagggccggttcaccatcagccgggacaacagcaagaacaccctgtacctgcagatgaacagcctgcgggccgaggacaccgccgtgtactactgcgccaagggatggttcggcggcttcaactactggggacagggcaccctggtcacagtgtccagcgctagcaccaagggcccctccgtgttccccctggcccccagcagcaagagcaccagcggcggcacagccgctctgggctgcctggtcaaggactacttccccgagcccgtgaccgtgtcctggaacagcggagccctgacctccggcgtgcacaccttccccgccgtgctgcagagttctggcctgtatagcctgagcagcgtggtcaccgtgccttctagcagcctgggcacccagacctacatctgcaacgtgaaccacaagcccagcaacaccaaggtggacaagaaggtggagcccaagagctgcgacaaaactcacacatgcccaccgtgcccagcacctgaagctgcagggggaccgtcagtcttcctcttccccccaaaacccaaggacaccctcatgatctcccggacccctgaggtcacatgcgtggtggtggacgtgagccacgaagaccctgaggtcaagttcaactggtacgtggacggcgtggaggtgcataatgccaagacaaagccgcgggaggagcagtacaacagcacgtaccgtgtggtcagcgtcctcaccgtcctgcaccaggactggctgaatggcaaggagtacaagtgcaaggtctccaacaaagccctcggcgcccccatcgagaaaaccatctccaaagccaaagggcagccccgagaaccacaggtgtgcaccctgcccccatcccgggatgagctgaccaagaaccaggtcagcctctcgtgcgcagtcaaaggcttctatcccagcgacatcgccgtggagtgggagagcaatgggcagccggagaacaactacaagaccacgcctcccgtgctggactccgacggctccttcttcctcgtgagcaagctcaccgtggacaagagcaggtggcagcaggggaacgtcttctcatgctccgtgatgcatgaggctctgcacaaccactacacgcagaagagcctctccctgtctccgggtggaggcggcggaagcggaggaggaggatccagagagggccctgagctgagccctgatgatcctgccggactgctggacctgcggcagggaatgtttgcccagctggtggcccagaacgtgctgctgatcgatggccccctgtcctggtacagcgatcctggactggctggcgtgtcactgacaggcggcctgagctacaaagaggacaccaaagaactggtggtggccaaggccggcgtgtactacgtgttctttcagctggaactgcggagagtggtggccggcgaaggatctggctctgtgtctctggccctgcatctgcagcctctgagatctgctgctggcgccgctgctctggcactgacagtggatctgcctcctgccagcagcgaggcccggaatagcgcatttgggtttcaaggcaggctgctgcacctgtctgccggccagaggctgggagtgcatctgcacacagaggccagggctagacacgcctggcagctgacacagggcgctacagtgctgggcctgttcagagtgacccccgagattccagcaggcctgggaggcggcggatctggcggcggaggatctagagaaggacccgagctgtcccccgacgatcccgctgggctgctggatctgagacagggcatgttcgctcagctggtggctcagaatgtgctgctgattgacggacctctgagctggtactccgacccagggctggcaggggtgtccctgactgggggactgtcctacaaagaagatacaaaagaactggtggtggctaaagctggggtgtactatgtgttttttcagctggaactgaggcgggtggtggctggggagggctcaggatctgtgtccctggctctgcatctgcagccactgcgctctgcagcaggggctgcagcactggccctgactgtggacctgcccccagcttcttccgaggccagaaacagcgccttcgggttccaaggacgcctgctgcatctgagcgccggacagcgcctgggagtgcatctgcatactgaagccagagcccggcatgcttggcagctgactcagggggcaactgtgctgggactgtttcgcgtgacacctgagatcccagccgggctc

SEQ ID NO: 172 - DNA, 1242 bp, Artificial Sequence
  Description of Artificial Sequence: Synthetic polynucleotide
  nucleotide sequence of Fc knob monomeric 4-1BB (71-248) ligand
gacaaaactcacacatgcccaccgtgcccagcacctgaagctgcagggggaccgtcagtcttcctcttccccccaaaacccaaggacaccctcatgatctcccggacccctgaggtcacatgcgtggtggtggacgtgagccacgaagaccctgaggtcaagttcaactggtacgtggacggcgtggaggtgcataatgccaagacaaagccgcgggaggagcagtacaacagcacgtaccgtgtggtcagcgtcctcaccgtcctgcaccaggactggctgaatggcaaggagtacaagtgcaaggtctccaacaaagccctcggcgcccccatcgagaaaaccatctccaaagccaaagggcagccccgagaaccacaggtgtacaccctgcccccctgcagagatgagctgaccaagaaccaggtgtccctgtggtgtctggtcaagggcttctaccccagcgatatcgccgtggagtgggagagcaacggccagcctgagaacaactacaagaccaccccccctgtgctggacagcgacggcagcttcttcctgtactccaaactgaccgtggacaagagccggtggcagcagggcaacgtgttcagctgcagcgtgatgcacgaggccctgcacaaccactacacccagaagtccctgagcctgagccccggcggaggcggcggaagcggaggaggaggatccagagagggccctgagctgagccctgatgatcctgccggactgctggacctgcggcagggaatgtttgcccagctggtggcccagaacgtgctgctgatcgatggccccctgtcctggtacagcgatcctggactggctggcgtgtcactgacaggcggcctgagctacaaagaggacaccaaagaactggtggtggccaaggccggcgtgtactacgtgttctttcagctggaactgcggagagtggtggccggcgaaggatctggctctgtgtctctggccctgcatctgcagcctctgagatctgctgctggcgccgctgctctggcactgacagtggatctgcctcctgccagcagcgaggcccggaatagcgcatttgggtttcaaggcaggctgctgcacctgtctgccggccagaggctgggagtgcatctgcacacagaggccagggctagacacgcctggcagctgacacagggcgctacagtgctgggcctgttcagagtgacccccgagattcctgccgggctc

SEQ ID NO: 173 - protein, 822 aa, Artificial Sequence
  Description of Artificial Sequence: Synthetic polypeptide
  anti-FAP(4B9) Fc hole dimeric 4-1BB (71-248) ligand chain
EVQLLESGGGLVQPGGSLRLSCAASGFTFSSYAMSWVRQAPGKGLEWVSAIIGSGASTYYADSVKGRFTISRDNSKNTLYLQMNSLRAEDTAVYYCAKGWFGGFNYWGQGTLVTVSSASTKGPSVFPLAPSSKSTSGGTAALGCLVKDYFPEPVTVSWNSGALTSGVHTFPAVLQSSGLYSLSSVVTVPSSSLGTQTYICNVNHKPSNTKVDKKVEPKSCDKTHTCPPCPAPEAAGGPSVFLFPPKPKDTLMISRTPEVTCVVVDVSHEDPEVKFNWYVDGVEVHNAKTKPREEQYNSTYRVVSVLTVLHQDWLNGKEYKCKVSNKALGAPIEKTISKAKGQPREPQVCTLPPSRDELTKNQVSLSCAVKGFYPSDIAVEWESNGQPENNYKTTPPVLDSDGSFFLVSKLTVDKSRWQQGNVFSCSVMHEALHNHYTQKSLSLSPGGGGGSGGGGSREGPELSPDDPAGLLDLRQGMFAQLVAQNVLLIDGPLSWYSDPGLAGVSLTGGLSYKEDTKELVVAKAGVYYVFFQLELRRVVAGEGSGSVSLALHLQPLRSAAGAAALALTVDLPPASSEARNSAFGFQGRLLHLSAGQRLGVHLHTEARARHAWQLTQGATVLGLFRVTPEIPAGLGGGGSGGGGSREGPELSPDDPAGLLDLRQGMFAQLVAQNVLLIDGPLSWYSDPGLAGVSLTGGLSYKEDTKELVVAKAGVYYVFFQLELRRVVAGEGSGSVSLALHLQPLRSAAGAAALALTVDLPPASSEARNSAFGFQGRLLHLSAGQRLGVHLHTEARARHAWQLTQGATVLGLFRVTPEIPAGL

SEQ ID NO: 174 - protein, 414 aa, Artificial Sequence
  Description of Artificial Sequence: Synthetic polypeptide
  Fc knob monomeric 41-BBL (71-248)
DKTHTCPPCPAPEAAGGPSVFLFPPKPKDTLMISRTPEVTCVVVDVSHEDPEVKFNWYVDGVEVHNAKTKPREEQYNSTYRVVSVLTVLHQDWLNGKEYKCKVSNKALGAPIEKTISKAKGQPREPQVYTLPPCRDELTKNQVSLWCLVKGFYPSDIAVEWESNGQPENNYKTTPPVLDSDGSFFLYSKLTVDKSRWQQGNVFSCSVMHEALHNHYTQKSLSLSPGGGGGSGGGGSREGPELSPDDPAGLLDLRQGMFAQLVAQNVLLIDGPLSWYSDPGLAGVSLTGGLSYKEDTKELVVAKAGVYYVFFQLELRRVVAGEGSGSVSLALHLQPLRSAAGAAALALTVDLPPASSEARNSAFGFQGRLLHLSAGQRLGVHLHTEARARHAWQLTQGATVLGLFRVTPEIPAGL

SEQ ID NO: 175 - DNA, 1902 bp, Artificial Sequence
  Description of Artificial Sequence: Synthetic polynucleotide
  nucleotide sequence of anti-FAP(4B9) Fc hole monomeric 4-1BBL (71-248) chain
gaggtgcagctgctcgaaagcggcggaggactggtgcagcctggcggcagcctgagactgtcttgcgccgccagcggcttcaccttcagcagctacgccatgagctgggtccgccaggcccctggcaagggactggaatgggtgtccgccatcatcggctctggcgccagcacctactacgccgacagcgtgaagggccggttcaccatcagccgggacaacagcaagaacaccctgtacctgcagatgaacagcctgcgggccgaggacaccgccgtgtactactgcgccaagggatggttcggcggcttcaactactggggacagggcaccctggtcacagtgtccagcgctagcaccaagggcccctccgtgttccccctggcccccagcagcaagagcaccagcggcggcacagccgctctgggctgcctggtcaaggactacttccccgagcccgtgaccgtgtcctggaacagcggagccctgacctccggcgtgcacaccttccccgccgtgctgcagagttctggcctgtatagcctgagcagcgtggtcaccgtgccttctagcagcctgggcacccagacctacatctgcaacgtgaaccacaagcccagcaacaccaaggtggacaagaaggtggagcccaagagctgcgacaaaactcacacatgcccaccgtgcccagcacctgaagctgcagggggaccgtcagtcttcctcttccccccaaaacccaaggacaccctcatgatctcccggacccctgaggtcacatgcgtggtggtggacgtgagccacgaagaccctgaggtcaagttcaactggtacgtggacggcgtggaggtgcataatgccaagacaaagccgcgggaggagcagtacaacagcacgtaccgtgtggtcagcgtcctcaccgtcctgcaccaggactggctgaatggcaaggagtacaagtgcaaggtctccaacaaagccctcggcgcccccatcgagaaaaccatctccaaagccaaagggcagccccgagaaccacaggtgtgcaccctgcccccatcccgggatgagctgaccaagaaccaggtcagcctctcgtgcgcagtcaaaggcttctatcccagcgacatcgccgtggagtgggagagcaatgggcagccggagaacaactacaagaccacgcctcccgtgctggactccgacggctccttcttcctcgtgagcaagctcaccgtggacaagagcaggtggcagcaggggaacgtcttctcatgctccgtgatgcatgaggctctgcacaaccactacacgcagaagagcctctccctgtctccgggtggaggcggcggaagcggaggaggaggatccagagagggccctgagctgagccctgatgatcctgccggactgctggacctgcggcagggaatgtttgcccagctggtggcccagaacgtgctgctgatcgatggccccctgtcctggtacagcgatcctggactggctggcgtgtcactgacaggcggcctgagctacaaagaggacaccaaagaactggtggtggccaaggccggcgtgtactacgtgttctttcagctggaactgcggagagtggtggccggcgaaggatctggctctgtgtctctggccctgcatctgcagcctctgagatctgctgctggcgccgctgctctggcactgacagtggatctgcctcctgccagcagcgaggcccggaatagcgcatttgggtttcaaggcaggctgctgcacctgtctgccggccagaggctgggagtgcatctgcacacagaggccagggctagacacgcctggcagctgacacagggcgctacagtgctgggcctgttcagagtgacccccgagattcctgccgggctc

SEQ ID NO: 176 - DNA, 1806 bp, Artificial Sequence
  Description of Artificial Sequence: Synthetic polynucleotide
  nucleotide sequence of Fc knob dimeric 4-1BB ligand (71-248)
gacaaaactcacacatgcccaccgtgcccagcacctgaagctgcagggggaccgtcagtcttcctcttccccccaaaacccaaggacaccctcatgatctcccggacccctgaggtcacatgcgtggtggtggacgtgagccacgaagaccctgaggtcaagttcaactggtacgtggacggcgtggaggtgcataatgccaagacaaagccgcgggaggagcagtacaacagcacgtaccgtgtggtcagcgtcctcaccgtcctgcaccaggactggctgaatggcaaggagtacaagtgcaaggtctccaacaaagccctcggcgcccccatcgagaaaaccatctccaaagccaaagggcagccccgagaaccacaggtgtacaccctgcccccctgcagagatgagctgaccaagaaccaggtgtccctgtggtgtctggtcaagggcttctaccccagcgatatcgccgtggagtgggagagcaacggccagcctgagaacaactacaagaccaccccccctgtgctggacagcgacggcagcttcttcctgtactccaaactgaccgtggacaagagccggtggcagcagggcaacgtgttcagctgcagcgtgatgcacgaggccctgcacaaccactacacccagaagtccctgagcctgagccccggcggaggcggcggaagcggaggaggaggatccagagagggccctgagctgagccctgatgatcctgccggactgctggacctgcggcagggaatgtttgcccagctggtggcccagaacgtgctgctgatcgatggccccctgtcctggtacagcgatcctggactggctggcgtgtcactgacaggcggcctgagctacaaagaggacaccaaagaactggtggtggccaaggccggcgtgtactacgtgttctttcagctggaactgcggagagtggtggccggcgaaggatctggctctgtgtctctggccctgcatctgcagcctctgagatctgctgctggcgccgctgctctggcactgacagtggatctgcctcctgccagcagcgaggcccggaatagcgcatttgggtttcaaggcaggctgctgcacctgtctgccggccagaggctgggagtgcatctgcacacagaggccagggctagacacgcctggcagctgacacagggcgctacagtgctgggcctgttcagagtgacccccgagattccagcaggcctgggaggcggcggatctggcggcggaggatctagagaaggacccgagctgtcccccgacgatcccgctgggctgctggatctgagacagggcatgttcgctcagctggtggctcagaatgtgctgctgattgacggacctctgagctggtactccgacccagggctggcaggggtgtccctgactgggggactgtcctacaaagaagatacaaaagaactggtggtggctaaagctggggtgtactatgtgttttttcagctggaactgaggcgggtggtggctggggagggctcaggatctgtgtccctggctctgcatctgcagccactgcgctctgcagcaggggctgcagcactggccctgactgtggacctgcccccagcttcttccgaggccagaaacagcgccttcgggttccaaggacgcctgctgcatctgagcgccggacagcgcctgggagtgcatctgcatactgaagccagagcccggcatgcttggcagctgactcagggggcaactgtgctgggactgtttcgcgtgacacctgagatcccagccgggctc

SEQ ID NO: 177 - protein, 634 aa, Artificial Sequence
  Description of Artificial Sequence: Synthetic polypeptide
  anti-FAP(4B9) Fc hole monomeric 4-1BB ligand (71-248) chain
EVQLLESGGGLVQPGGSLRLSCAASGFTFSSYAMSWVRQAPGKGLEWVSAIIGSGASTYYADSVKGRFTISRDNSKNTLYLQMNSLRAEDTAVYYCAKGWFGGFNYWGQGTLVTVSSASTKGPSVFPLAPSSKSTSGGTAALGCLVKDYFPEPVTVSWNSGALTSGVHTFPAVLQSSGLYSLSSVVTVPSSSLGTQTYICNVNHKPSNTKVDKKVEPKSCDKTHTCPPCPAPEAAGGPSVFLFPPKPKDTLMISRTPEVTCVVVDVSHEDPEVKFNWYVDGVEVHNAKTKPREEQYNSTYRVVSVLTVLHQDWLNGKEYKCKVSNKALGAPIEKTISKAKGQPREPQVCTLPPSRDELTKNQVSLSCAVKGFYPSDIAVEWESNGQPENNYKTTPPVLDSDGSFFLVSKLTVDKSRWQQGNVFSCSVMHEALHNHYTQKSLSLSPGGGGGSGGGGSREGPELSPDDPAGLLDLRQGMFAQLVAQNVLLIDGPLSWYSDPGLAGVSLTGGLSYKEDTKELVVAKAGVYYVFFQLELRRVVAGEGSGSVSLALHLQPLRSAAGAAALALTVDLPPASSEARNSAFGFQGRLLHLSAGQRLGVHLHTEARARHAWQLTQGATVLGLFRVTPEIPAGL

SEQ ID NO: 178 - protein, 602 aa, Artificial Sequence
  Description of Artificial Sequence: Synthetic polypeptide
  Fc knob dimeric 4-1BB ligand (71-248)
DKTHTCPPCPAPEAAGGPSVFLFPPKPKDTLMISRTPEVTCVVVDVSHEDPEVKFNWYVDGVEVHNAKTKPREEQYNSTYRVVSVLTVLHQDWLNGKEYKCKVSNKALGAPIEKTISKAKGQPREPQVYTLPPCRDELTKNQVSLWCLVKGFYPSDIAVEWESNGQPENNYKTTPPVLDSDGSFFLYSKLTVDKSRWQQGNVFSCSVMHEALHNHYTQKSLSLSPGGGGGSGGGGSREGPELSPDDPAGLLDLRQGMFAQLVAQNVLLIDGPLSWYSDPGLAGVSLTGGLSYKEDTKELVVAKAGVYYVFFQLELRRVVAGEGSGSVSLALHLQPLRSAAGAAALALTVDLPPASSEARNSAFGFQGRLLHLSAGQRLGVHLHTEARARHAWQLTQGATVLGLFRVTPEIPAGLGGGGSGGGGSREGPELSPDDPAGLLDLRQGMFAQLVAQNVLLIDGPLSWYSDPGLAGVSLTGGLSYKEDTKELVVAKAGVYYVFFQLELRRVVAGEGSGSVSLALHLQPLRSAAGAAALALTVDLPPASSEARNSAFGFQGRLLHLSAGQRLGVHLHTEARARHAWQLTQGATVLGLFRVTPEIPAGL

SEQ ID NO: 179 - DNA, 2463 bp, Artificial Sequence
  Description of Artificial Sequence: Synthetic polynucleotide
  nucleotide sequence of anti-FAP(28H1) Fc hole dimeric 4-1BB ligand (71-248) chain
gaagtgcagctgctggaatccggcggaggcctggtgcagcctggcggatctctgagactgtcctgcgccgcctccggcttcaccttctcctcccacgccatgtcctgggtccgacaggctcctggcaaaggcctggaatgggtgtccgccatctgggcctccggcgagcagtactacgccgactctgtgaagggccggttcaccatctcccgggacaactccaagaacaccctgtacctgcagatgaactccctgcgggccgaggacaccgccgtgtactactgtgccaagggctggctgggcaacttcgactactggggacagggcaccctggtcaccgtgtccagcgctagcaccaagggcccctccgtgttccccctggcccccagcagcaagagcaccagcggcggcacagccgctctgggctgcctggtcaaggactacttccccgagcccgtgaccgtgtcctggaacagcggagccctgacctccggcgtgcacaccttccccgccgtgctgcagagttctggcctgtatagcctgagcagcgtggtcaccgtgccttctagcagcctgggcacccagacctacatctgcaacgtgaaccacaagcccagcaacaccaaggtggacaagaaggtggagcccaagagctgcgacaaaactcacacatgcccaccgtgcccagcacctgaagctgcagggggaccgtcagtcttcctcttccccccaaaacccaaggacaccctcatgatctcccggacccctgaggtcacatgcgtggtggtggacgtgagccacgaagaccctgaggtcaagttcaactggtacgtggacggcgtggaggtgcataatgccaagacaaagccgcgggaggagcagtacaacagcacgtaccgtgtggtcagcgtcctcaccgtcctgcaccaggactggctgaatggcaaggagtacaagtgcaaggtctccaacaaagccctcggcgcccccatcgagaaaaccatctccaaagccaaagggcagccccgagaaccacaggtgtgcaccctgcccccatcccgggatgagctgaccaagaaccaggtcagcctctcgtgcgcagtcaaaggcttctatcccagcgacatcgccgtggagtgggagagcaatgggcagccggagaacaactacaagaccacgcctcccgtgctggactccgacggctccttcttcctcgtgagcaagctcaccgtggacaagagcaggtggcagcaggggaacgtcttctcatgctccgtgatgcatgaggctctgcacaaccactacacgcagaagagcctctccctgtctccgggtggaggcggcggaagcggaggaggaggatccagagagggccctgagctgagccctgatgatcctgccggactgctggacctgcggcagggaatgtttgcccagctggtggcccagaacgtgctgctgatcgatggccccctgtcctggtacagcgatcctggactggctggcgtgtcactgacaggcggcctgagctacaaagaggacaccaaagaactggtggtggccaaggccggcgtgtactacgtgttctttcagctggaactgcggagagtggtggccggcgaaggatctggctctgtgtctctggccctgcatctgcagcctctgagatctgctgctggcgccgctgctctggcactgacagtggatctgcctcctgccagcagcgaggcccggaatagcgcatttgggtttcaaggcaggctgctgcacctgtctgccggccagaggctgggagtgcatctgcacacagaggccagggctagacacgcctggcagctgacacagggcgctacagtgctgggcctgttcagagtgacccccgagattccagcaggcctgggaggcggcggatctggcggcggaggatctagagaaggacccgagctgtcccccgacgatcccgctgggctgctggatctgagacagggcatgttcgctcagctggtggctcagaatgtgctgctgattgacggacctctgagctggtactccgacccagggctggcaggggtgtccctgactgggggactgtcctacaaagaagatacaaaagaactggtggtggctaaagctggggtgtactatgtgttttttcagctggaactgaggcgggtggtggctggggagggctcaggatctgtgtccctggctctgcatctgcagccactgcgctctgcagcaggggctgcagcactggccctgactgtggacctgcccccagcttcttccgaggccagaaacagcgccttcgggttccaaggacgcctgctgcatctgagcgccggacagcgcctgggagtgcatctgcatactgaagccagagcccggcatgcttggcagctgactcagggggcaactgtgctgggactgtttcgcgtgacacctgagatcccagccgggctc

SEQ ID NO: 180 - protein, 821 aa, Artificial Sequence
  Description of Artificial Sequence: Synthetic polypeptide
  anti-FAP(28H1) Fc hole dimeric 4-1BB ligand (71-248) chain
EVQLLESGGGLVQPGGSLRLSCAASGFTFSSHAMSWVRQAPGKGLEWVSAIWASGEQYYADSVKGRFTISRDNSKNTLYLQMNSLRAEDTAVYYCAKGWLGNFDYWGQGTLVTVSSASTKGPSVFPLAPSSKSTSGGTAALGCLVKDYFPEPVTVSWNSGALTSGVHTFPAVLQSSGLYSLSSVVTVPSSSLGTQTYICNVNHKPSNTKVDKKVEPKSCDKTHTCPPCPAPEAAGGPSVFLFPPKPKDTLMISRTPEVTCVVVDVSHEDPEVKFNWYVDGVEVHNAKTKPREEQYNSTYRVVSVLTVLHQDWLNGKEYKCKVSNKALGAPIEKTISKAKGQPREPQVCTLPPSRDELTKNQVSLSCAVKGFYPSDIAVEWESNGQPENNYKTTPPVLDSDGSFFLVSKLTVDKSRWQQGNVFSCSVMHEALHNHYTQKSLSLSPGGGGGSGGGGSREGPELSPDDPAGLLDLRQGMFAQLVAQNVLLIDGPLSWYSDPGLAGVSLTGGLSYKEDTKELVVAKAGVYYVFFQLELRRVVAGEGSGSVSLALHLQPLRSAAGAAALALTVDLPPASSEARNSAFGFQGRLLHLSAGQRLGVHLHTEARARHAWQLTQGATVLGLFRVTPEIPAGLGGGGSGGGGSREGPELSPDDPAGLLDLRQGMFAQLVAQNVLLIDGPLSWYSDPGLAGVSLTGGLSYKEDTKELVVAKAGVYYVFFQLELRRVVAGEGSGSVSLALHLQPLRSAAGAAALALTVDLPPASSEARNSAFGFQGRLLHLSAGQRLGVHLHTEARARHAWQLTQGATVLGLFRVTPEIPAGL

SEQ ID NO: 181 - DNA, 1899 bp, Artificial Sequence
  Description of Artificial Sequence: Synthetic polynucleotide
  nucleotide sequence of anti-FAP(28H1) Fc hole monomeric 4-1BB ligand (71-248) chain
gaagtgcagctgctggaatccggcggaggcctggtgcagcctggcggatctctgagactgtcctgcgccgcctccggcttcaccttctcctcccacgccatgtcctgggtccgacaggctcctggcaaaggcctggaatgggtgtccgccatctgggcctccggcgagcagtactacgccgactctgtgaagggccggttcaccatctcccgggacaactccaagaacaccctgtacctgcagatgaactccctgcgggccgaggacaccgccgtgtactactgtgccaagggctggctgggcaacttcgactactggggacagggcaccctggtcaccgtgtccagcgctagcaccaagggcccctccgtgttccccctggcccccagcagcaagagcaccagcggcggcacagccgctctgggctgcctggtcaaggactacttccccgagcccgtgaccgtgtcctggaacagcggagccctgacctccggcgtgcacaccttccccgccgtgctgcagagttctggcctgtatagcctgagcagcgtggtcaccgtgccttctagcagcctgggcacccagacctacatctgcaacgtgaaccacaagcccagcaacaccaaggtggacaagaaggtggagcccaagagctgcgacaaaactcacacatgcccaccgtgcccagcacctgaagctgcagggggaccgtcagtcttcctcttccccccaaaacccaaggacaccctcatgatctcccggacccctgaggtcacatgcgtggtggtggacgtgagccacgaagaccctgaggtcaagttcaactggtacgtggacggcgtggaggtgcataatgccaagacaaagccgcgggaggagcagtacaacagcacgtaccgtgtggtcagcgtcctcaccgtcctgcaccaggactggctgaatggcaaggagtacaagtgcaaggtctccaacaaagccctcggcgcccccatcgagaaaaccatctccaaagccaaagggcagccccgagaaccacaggtgtgcaccctgcccccatcccgggatgagctgaccaagaaccaggtcagcctctcgtgcgcagtcaaaggcttctatcccagcgacatcgccgtggagtgggagagcaatgggcagccggagaacaactacaagaccacgcctcccgtgctggactccgacggctccttcttcctcgtgagcaagctcaccgtggacaagagcaggtggcagcaggggaacgtcttctcatgctccgtgatgcatgaggctctgcacaaccactacacgcagaagagcctctccctgtctccgggtggaggcggcggaagcggaggaggaggatccagagagggccctgagctgagccctgatgatcctgccggactgctggacctgcggcagggaatgtttgcccagctggtggcccagaacgtgctgctgatcgatggccccctgtcctggtacagcgatcctggactggctggcgtgtcactgacaggcggcctgagctacaaagaggacaccaaagaactggtggtggccaaggccggcgtgtactacgtgttctttcagctggaactgcggagagtggtggccggcgaaggatctggctctgtgtctctggccctgcatctgcagcctctgagatctgctgctggcgccgctgctctggcactgacagtggatctgcctcctgccagcagcgaggcccggaatagcgcatttgggtttcaaggcaggctgctgcacctgtctgccggccagaggctgggagtgcatctgcacacagaggccagggctagacacgcctggcagctgacacagggcgctacagtgctgggcctgttcagagtgacccccgagattcctgccgggctc

SEQ ID NO: 182 - protein, 633 aa, Artificial Sequence
  Description of Artificial Sequence: Synthetic polypeptide
  anti-FAP(28H1) Fc hole monomeric 4-1BBL (71-248) chain
EVQLLESGGGLVQPGGSLRLSCAASGFTFSSHAMSWVRQAPGKGLEWVSAIWASGEQYYADSVKGRFTISRDNSKNTLYLQMNSLRAEDTAVYYCAKGWLGNFDYWGQGTLVTVSSASTKGPSVFPLAPSSKSTSGGTAALGCLVKDYFPEPVTVSWNSGALTSGVHTFPAVLQSSGLYSLSSVVTVPSSSLGTQTYICNVNHKPSNTKVDKKVEPKSCDKTHTCPPCPAPEAAGGPSVFLFPPKPKDTLMISRTPEVTCVVVDVSHEDPEVKFNWYVDGVEVHNAKTKPREEQYNSTYRVVSVLTVLHQDWLNGKEYKCKVSNKALGAPIEKTISKAKGQPREPQVCTLPPSRDELTKNQVSLSCAVKGFYPSDIAVEWESNGQPENNYKTTPPVLDSDGSFFLVSKLTVDKSRWQQGNVFSCSVMHEALHNHYTQKSLSLSPGGGGGSGGGGSREGPELSPDDPAGLLDLRQGMFAQLVAQNVLLIDGPLSWYSDPGLAGVSLTGGLSYKEDTKELVVAKAGVYYVFFQLELRRVVAGEGSGSVSLALHLQPLRSAAGAAALALTVDLPPASSEARNSAFGFQGRLLHLSAGQRLGVHLHTEARARHAWQLTQGATVLGLFRVTPEIPAGL

SEQ ID NO: 183 - DNA, 2478 bp, Artificial Sequence
  Description of Artificial Sequence: Synthetic polynucleotide
  nucleotide sequence of anti- CD19(8B8-018) Fc hole dimeric 4-1BB ligand (71-248) chain
caggtccagctggtgcagtccggcgccgaggtcaagaaacccggggcttctgtgaaggtttcatgcaaggcaagcggatacaccttcaccgactatatcatgcattgggtcaggcaggcccctggccaaggtctcgaatggatgggctacattaacccatataatgatggctccaaatacaccgagaagtttcagggaagagtcactatgacatctgacaccagtatcagcactgcttacatggagctgtcccgccttcggtctgatgacaccgcagtgtattactgtgccaggggcacatattactacggctcagctctgttcgactattgggggcagggaaccacagtaaccgtgagctccgctagcaccaagggcccctccgtgttccccctggcccccagcagcaagagcaccagcggcggcacagccgctctgggctgcctggtcaaggactacttccccgagcccgtgaccgtgtcctggaacagcggagccctgacctccggcgtgcacaccttccccgccgtgctgcagagttctggcctgtatagcctgagcagcgtggtcaccgtgccttctagcagcctgggcacccagacctacatctgcaacgtgaaccacaagcccagcaacaccaaggtggacaagaaggtggagcccaagagctgcgacaaaactcacacatgcccaccgtgcccagcacctgaagctgcagggggaccgtcagtcttcctcttccccccaaaacccaaggacaccctcatgatctcccggacccctgaggtcacatgcgtggtggtggacgtgagccacgaagaccctgaggtcaagttcaactggtacgtggacggcgtggaggtgcataatgccaagacaaagccgcgggaggagcagtacaacagcacgtaccgtgtggtcagcgtcctcaccgtcctgcaccaggactggctgaatggcaaggagtacaagtgcaaggtctccaacaaagccctcggcgcccccatcgagaaaaccatctccaaagccaaagggcagccccgagaaccacaggtgtgcaccctgcccccatcccgggatgagctgaccaagaaccaggtcagcctctcgtgcgcagtcaaaggcttctatcccagcgacatcgccgtggagtgggagagcaatgggcagccggagaacaactacaagaccacgcctcccgtgctggactccgacggctccttcttcctcgtgagcaagctcaccgtggacaagagcaggtggcagcaggggaacgtcttctcatgctccgtgatgcatgaggctctgcacaaccactacacgcagaagagcctctccctgtctccgggtggaggcggcggaagcggaggaggaggatccagagagggccctgagctgagccctgatgatcctgccggactgctggacctgcggcagggaatgtttgcccagctggtggcccagaacgtgctgctgatcgatggccccctgtcctggtacagcgatcctggactggctggcgtgtcactgacaggcggcctgagctacaaagaggacaccaaagaactggtggtggccaaggccggcgtgtactacgtgttctttcagctggaactgcggagagtggtggccggcgaaggatctggctctgtgtctctggccctgcatctgcagcctctgagatctgctgctggcgccgctgctctggcactgacagtggatctgcctcctgccagcagcgaggcccggaatagcgcatttgggtttcaaggcaggctgctgcacctgtctgccggccagaggctgggagtgcatctgcacacagaggccagggctagacacgcctggcagctgacacagggcgctacagtgctgggcctgttcagagtgacccccgagattccagcaggcctgggaggcggcggatctggcggcggaggatctagagaaggacccgagctgtcccccgacgatcccgctgggctgctggatctgagacagggcatgttcgctcagctggtggctcagaatgtgctgctgattgacggacctctgagctggtactccgacccagggctggcaggggtgtccctgactgggggactgtcctacaaagaagatacaaaagaactggtggtggctaaagctggggtgtactatgtgttttttcagctggaactgaggcgggtggtggctggggagggctcaggatctgtgtccctggctctgcatctgcagccactgcgctctgcagcaggggctgcagcactggccctgactgtggacctgcccccagcttcttccgaggccagaaacagcgccttcgggttccaaggacgcctgctgcatctgagcgccggacagcgcctgggagtgcatctgcatactgaagccagagcccggcatgcttggcagctgactcagggggcaactgtgctgggactgtttcgcgtgacacctgagatcccagccgggctc

SEQ ID NO: 184 - protein, 826 aa, Artificial Sequence
  Description of Artificial Sequence: Synthetic polypeptide
  anti- CD19(8B8-018) Fc hole dimeric 4-1BB (71-248) ligand chain
QVQLVQSGAEVKKPGASVKVSCKASGYTFTDYIMHWVRQAPGQGLEWMGYINPYNDGSKYTEKFQGRVTMTSDTSISTAYMELSRLRSDDTAVYYCARGTYYYGSALFDYWGQGTTVTVSSASTKGPSVFPLAPSSKSTSGGTAALGCLVKDYFPEPVTVSWNSGALTSGVHTFPAVLQSSGLYSLSSVVTVPSSSLGTQTYICNVNHKPSNTKVDKKVEPKSCDKTHTCPPCPAPEAAGGPSVFLFPPKPKDTLMISRTPEVTCVVVDVSHEDPEVKFNWYVDGVEVHNAKTKPREEQYNSTYRVVSVLTVLHQDWLNGKEYKCKVSNKALGAPIEKTISKAKGQPREPQVCTLPPSRDELTKNQVSLSCAVKGFYPSDIAVEWESNGQPENNYKTTPPVLDSDGSFFLVSKLTVDKSRWQQGNVFSCSVMHEALHNHYTQKSLSLSPGGGGGSGGGGSREGPELSPDDPAGLLDLRQGMFAQLVAQNVLLIDGPLSWYSDPGLAGVSLTGGLSYKEDTKELVVAKAGVYYVFFQLELRRVVAGEGSGSVSLALHLQPLRSAAGAAALALTVDLPPASSEARNSAFGFQGRLLHLSAGQRLGVHLHTEARARHAWQLTQGATVLGLFRVTPEIPAGLGGGGSGGGGSREGPELSPDDPAGLLDLRQGMFAQLVAQNVLLIDGPLSWYSDPGLAGVSLTGGLSYKEDTKELVVAKAGVYYVFFQLELRRVVAGEGSGSVSLALHLQPLRSAAGAAALALTVDLPPASSEARNSAFGFQGRLLHLSAGQRLGVHLHTEARARHAWQLTQGATVLGLFRVTPEIPAGL

SEQ ID NO: 185 - DNA, 1914 bp, Artificial Sequence
  Description of Artificial Sequence: Synthetic polynucleotide
  nucleotide sequence of anti- CD19(8B8-018) Fc hole monomeric 4-1BBL (71-248) chain
caggtccagctggtgcagtccggcgccgaggtcaagaaacccggggcttctgtgaaggtttcatgcaaggcaagcggatacaccttcaccgactatatcatgcattgggtcaggcaggcccctggccaaggtctcgaatggatgggctacattaacccatataatgatggctccaaatacaccgagaagtttcagggaagagtcactatgacatctgacaccagtatcagcactgcttacatggagctgtcccgccttcggtctgatgacaccgcagtgtattactgtgccaggggcacatattactacggctcagctctgttcgactattgggggcagggaaccacagtaaccgtgagctccgctagcaccaagggcccctccgtgttccccctggcccccagcagcaagagcaccagcggcggcacagccgctctgggctgcctggtcaaggactacttccccgagcccgtgaccgtgtcctggaacagcggagccctgacctccggcgtgcacaccttccccgccgtgctgcagagttctggcctgtatagcctgagcagcgtggtcaccgtgccttctagcagcctgggcacccagacctacatctgcaacgtgaaccacaagcccagcaacaccaaggtggacaagaaggtggagcccaagagctgcgacaaaactcacacatgcccaccgtgcccagcacctgaagctgcagggggaccgtcagtcttcctcttccccccaaaacccaaggacaccctcatgatctcccggacccctgaggtcacatgcgtggtggtggacgtgagccacgaagaccctgaggtcaagttcaactggtacgtggacggcgtggaggtgcataatgccaagacaaagccgcgggaggagcagtacaacagcacgtaccgtgtggtcagcgtcctcaccgtcctgcaccaggactggctgaatggcaaggagtacaagtgcaaggtctccaacaaagccctcggcgcccccatcgagaaaaccatctccaaagccaaagggcagccccgagaaccacaggtgtgcaccctgcccccatcccgggatgagctgaccaagaaccaggtcagcctctcgtgcgcagtcaaaggcttctatcccagcgacatcgccgtggagtgggagagcaatgggcagccggagaacaactacaagaccacgcctcccgtgctggactccgacggctccttcttcctcgtgagcaagctcaccgtggacaagagcaggtggcagcaggggaacgtcttctcatgctccgtgatgcatgaggctctgcacaaccactacacgcagaagagcctctccctgtctccgggtggaggcggcggaagcggaggaggaggatccagagagggccctgagctgagccctgatgatcctgccggactgctggacctgcggcagggaatgtttgcccagctggtggcccagaacgtgctgctgatcgatggccccctgtcctggtacagcgatcctggactggctggcgtgtcactgacaggcggcctgagctacaaagaggacaccaaagaactggtggtggccaaggccggcgtgtactacgtgttctttcagctggaactgcggagagtggtggccggcgaaggatctggctctgtgtctctggccctgcatctgcagcctctgagatctgctgctggcgccgctgctctggcactgacagtggatctgcctcctgccagcagcgaggcccggaatagcgcatttgggtttcaaggcaggctgctgcacctgtctgccggccagaggctgggagtgcatctgcacacagaggccagggctagacacgcctggcagctgacacagggcgctacagtgctgggcctgttcagagtgacccccgagattcctgccgggctc

SEQ ID NO: 186 - protein, 638 aa, Artificial Sequence
  Description of Artificial Sequence: Synthetic polypeptide
  anti- CD19(8B8-018) Fc hole monomeric 4-1BB ligand (71-248) chain
QVQLVQSGAEVKKPGASVKVSCKASGYTFTDYIMHWVRQAPGQGLEWMGYINPYNDGSKYTEKFQGRVTMTSDTSISTAYMELSRLRSDDTAVYYCARGTYYYGSALFDYWGQGTTVTVSSASTKGPSVFPLAPSSKSTSGGTAALGCLVKDYFPEPVTVSWNSGALTSGVHTFPAVLQSSGLYSLSSVVTVPSSSLGTQTYICNVNHKPSNTKVDKKVEPKSCDKTHTCPPCPAPEAAGGPSVFLFPPKPKDTLMISRTPEVTCVVVDVSHEDPEVKFNWYVDGVEVHNAKTKPREEQYNSTYRVVSVLTVLHQDWLNGKEYKCKVSNKALGAPIEKTISKAKGQPREPQVCTLPPSRDELTKNQVSLSCAVKGFYPSDIAVEWESNGQPENNYKTTPPVLDSDGSFFLVSKLTVDKSRWQQGNVFSCSVMHEALHNHYTQKSLSLSPGGGGGSGGGGSREGPELSPDDPAGLLDLRQGMFAQLVAQNVLLIDGPLSWYSDPGLAGVSLTGGLSYKEDTKELVVAKAGVYYVFFQLELRRVVAGEGSGSVSLALHLQPLRSAAGAAALALTVDLPPASSEARNSAFGFQGRLLHLSAGQRLGVHLHTEARARHAWQLTQGATVLGLFRVTPEIPAGL

SEQ ID NO: 187 - DNA, 2478 bp, Artificial Sequence
  Description of Artificial Sequence: Synthetic polynucleotide
  nucleotide sequence of anti- CD19(8B8-2B11) Fc hole dimeric 4-1BB ligand (71-248) chain
caggtgcaattggttcaatctggtgctgaagtaaaaaaaccgggcgcttccgttaaagtgagctgcaaagcatctggttacaccttcactgactatatcatgcactgggttcgtcaggccccgggccagggtctggagtggatgggctacattaacccatacaacgacggttccaaatataccgagaaattccagggccgcgtcacgatgaccagcgacacttctatctccaccgcgtacatggaactgtctagactgcgttctgacgacaccgctgtttactattgtgcacgcggtacctactactacggtccacagctgtttgattactggggccaaggtaccacggtgaccgtaagctctgctagcaccaagggcccctccgtgttccccctggcccccagcagcaagagcaccagcggcggcacagccgctctgggctgcctggtcaaggactacttccccgagcccgtgaccgtgtcctggaacagcggagccctgacctccggcgtgcacaccttccccgccgtgctgcagagttctggcctgtatagcctgagcagcgtggtcaccgtgccttctagcagcctgggcacccagacctacatctgcaacgtgaaccacaagcccagcaacaccaaggtggacaagaaggtggagcccaagagctgcgacaaaactcacacatgcccaccgtgcccagcacctgaagctgcagggggaccgtcagtcttcctcttccccccaaaacccaaggacaccctcatgatctcccggacccctgaggtcacatgcgtggtggtggacgtgagccacgaagaccctgaggtcaagttcaactggtacgtggacggcgtggaggtgcataatgccaagacaaagccgcgggaggagcagtacaacagcacgtaccgtgtggtcagcgtcctcaccgtcctgcaccaggactggctgaatggcaaggagtacaagtgcaaggtctccaacaaagccctcggcgcccccatcgagaaaaccatctccaaagccaaagggcagccccgagaaccacaggtgtgcaccctgcccccatcccgggatgagctgaccaagaaccaggtcagcctctcgtgcgcagtcaaaggcttctatcccagcgacatcgccgtggagtgggagagcaatgggcagccggagaacaactacaagaccacgcctcccgtgctggactccgacggctccttcttcctcgtgagcaagctcaccgtggacaagagcaggtggcagcaggggaacgtcttctcatgctccgtgatgcatgaggctctgcacaaccactacacgcagaagagcctctccctgtctccgggtggaggcggcggaagcggaggaggaggatccagagagggccctgagctgagccctgatgatcctgccggactgctggacctgcggcagggaatgtttgcccagctggtggcccagaacgtgctgctgatcgatggccccctgtcctggtacagcgatcctggactggctggcgtgtcactgacaggcggcctgagctacaaagaggacaccaaagaactggtggtggccaaggccggcgtgtactacgtgttctttcagctggaactgcggagagtggtggccggcgaaggatctggctctgtgtctctggccctgcatctgcagcctctgagatctgctgctggcgccgctgctctggcactgacagtggatctgcctcctgccagcagcgaggcccggaatagcgcatttgggtttcaaggcaggctgctgcacctgtctgccggccagaggctgggagtgcatctgcacacagaggccagggctagacacgcctggcagctgacacagggcgctacagtgctgggcctgttcagagtgacccccgagattccagcaggcctgggaggcggcggatctggcggcggaggatctagagaaggacccgagctgtcccccgacgatcccgctgggctgctggatctgagacagggcatgttcgctcagctggtggctcagaatgtgctgctgattgacggacctctgagctggtactccgacccagggctggcaggggtgtccctgactgggggactgtcctacaaagaagatacaaaagaactggtggtggctaaagctggggtgtactatgtgttttttcagctggaactgaggcgggtggtggctggggagggctcaggatctgtgtccctggctctgcatctgcagccactgcgctctgcagcaggggctgcagcactggccctgactgtggacctgcccccagcttcttccgaggccagaaacagcgccttcgggttccaaggacgcctgctgcatctgagcgccggacagcgcctgggagtgcatctgcatactgaagccagagcccggcatgcttggcagctgactcagggggcaactgtgctgggactgtttcgcgtgacacctgagatcccagccgggctc

SEQ ID NO: 188 - protein, 826 aa, Artificial Sequence
  Description of Artificial Sequence: Synthetic polypeptide
  anti- CD19(8B8-2B11) Fc hole dimeric 4-1BB ligand (71-248) chain
QVQLVQSGAEVKKPGASVKVSCKASGYTFTDYIMHWVRQAPGQGLEWMGYINPYNDGSKYTEKFQGRVTMTSDTSISTAYMELSRLRSDDTAVYYCARGTYYYGPQLFDYWGQGTTVTVSSASTKGPSVFPLAPSSKSTSGGTAALGCLVKDYFPEPVTVSWNSGALTSGVHTFPAVLQSSGLYSLSSVVTVPSSSLGTQTYICNVNHKPSNTKVDKKVEPKSCDKTHTCPPCPAPEAAGGPSVFLFPPKPKDTLMISRTPEVTCVVVDVSHEDPEVKFNWYVDGVEVHNAKTKPREEQYNSTYRVVSVLTVLHQDWLNGKEYKCKVSNKALGAPIEKTISKAKGQPREPQVCTLPPSRDELTKNQVSLSCAVKGFYPSDIAVEWESNGQPENNYKTTPPVLDSDGSFFLVSKLTVDKSRWQQGNVFSCSVMHEALHNHYTQKSLSLSPGGGGGSGGGGSREGPELSPDDPAGLLDLRQGMFAQLVAQNVLLIDGPLSWYSDPGLAGVSLTGGLSYKEDTKELVVAKAGVYYVFFQLELRRVVAGEGSGSVSLALHLQPLRSAAGAAALALTVDLPPASSEARNSAFGFQGRLLHLSAGQRLGVHLHTEARARHAWQLTQGATVLGLFRVTPEIPAGLGGGGSGGGGSREGPELSPDDPAGLLDLRQGMFAQLVAQNVLLIDGPLSWYSDPGLAGVSLTGGLSYKEDTKELVVAKAGVYYVFFQLELRRVVAGEGSGSVSLALHLQPLRSAAGAAALALTVDLPPASSEARNSAFGFQGRLLHLSAGQRLGVHLHTEARARHAWQLTQGATVLGLFRVTPEIPAGL

SEQ ID NO: 189 - DNA, 1914 bp, Artificial Sequence
  Description of Artificial Sequence: Synthetic polynucleotide
  nucleotide sequence of anti- CD19(8B8-2B11) Fc hole monomeric 4-1BB ligand (71-248) chain
caggtgcaattggttcaatctggtgctgaagtaaaaaaaccgggcgcttccgttaaagtgagctgcaaagcatctggttacaccttcactgactatatcatgcactgggttcgtcaggccccgggccagggtctggagtggatgggctacattaacccatacaacgacggttccaaatataccgagaaattccagggccgcgtcacgatgaccagcgacacttctatctccaccgcgtacatggaactgtctagactgcgttctgacgacaccgctgtttactattgtgcacgcggtacctactactacggtccacagctgtttgattactggggccaaggtaccacggtgaccgtaagctctgctagcaccaagggcccctccgtgttccccctggcccccagcagcaagagcaccagcggcggcacagccgctctgggctgcctggtcaaggactacttccccgagcccgtgaccgtgtcctggaacagcggagccctgacctccggcgtgcacaccttccccgccgtgctgcagagttctggcctgtatagcctgagcagcgtggtcaccgtgccttctagcagcctgggcacccagacctacatctgcaacgtgaaccacaagcccagcaacaccaaggtggacaagaaggtggagcccaagagctgcgacaaaactcacacatgcccaccgtgcccagcacctgaagctgcagggggaccgtcagtcttcctcttccccccaaaacccaaggacaccctcatgatctcccggacccctgaggtcacatgcgtggtggtggacgtgagccacgaagaccctgaggtcaagttcaactggtacgtggacggcgtggaggtgcataatgccaagacaaagccgcgggaggagcagtacaacagcacgtaccgtgtggtcagcgtcctcaccgtcctgcaccaggactggctgaatggcaaggagtacaagtgcaaggtctccaacaaagccctcggcgcccccatcgagaaaaccatctccaaagccaaagggcagccccgagaaccacaggtgtgcaccctgcccccatcccgggatgagctgaccaagaaccaggtcagcctctcgtgcgcagtcaaaggcttctatcccagcgacatcgccgtggagtgggagagcaatgggcagccggagaacaactacaagaccacgcctcccgtgctggactccgacggctccttcttcctcgtgagcaagctcaccgtggacaagagcaggtggcagcaggggaacgtcttctcatgctccgtgatgcatgaggctctgcacaaccactacacgcagaagagcctctccctgtctccgggtggaggcggcggaagcggaggaggaggatccagagagggccctgagctgagccctgatgatcctgccggactgctggacctgcggcagggaatgtttgcccagctggtggcccagaacgtgctgctgatcgatggccccctgtcctggtacagcgatcctggactggctggcgtgtcactgacaggcggcctgagctacaaagaggacaccaaagaactggtggtggccaaggccggcgtgtactacgtgttctttcagctggaactgcggagagtggtggccggcgaaggatctggctctgtgtctctggccctgcatctgcagcctctgagatctgctgctggcgccgctgctctggcactgacagtggatctgcctcctgccagcagcgaggcccggaatagcgcatttgggtttcaaggcaggctgctgcacctgtctgccggccagaggctgggagtgcatctgcacacagaggccagggctagacacgcctggcagctgacacagggcgctacagtgctgggcctgttcagagtgacccccgagattcctgccgggctc

SEQ ID NO: 190 - protein, 638 aa, Artificial Sequence
  Description of Artificial Sequence: Synthetic polypeptide
  anti- CD19(8B8-2B11) Fc hole monomeric 4-1BBL (71-248) chain
QVQLVQSGAEVKKPGASVKVSCKASGYTFTDYIMHWVRQAPGQGLEWMGYINPYNDGSKYTEKFQGRVTMTSDTSISTAYMELSRLRSDDTAVYYCARGTYYYGPQLFDYWGQGTTVTVSSASTKGPSVFPLAPSSKSTSGGTAALGCLVKDYFPEPVTVSWNSGALTSGVHTFPAVLQSSGLYSLSSVVTVPSSSLGTQTYICNVNHKPSNTKVDKKVEPKSCDKTHTCPPCPAPEAAGGPSVFLFPPKPKDTLMISRTPEVTCVVVDVSHEDPEVKFNWYVDGVEVHNAKTKPREEQYNSTYRVVSVLTVLHQDWLNGKEYKCKVSNKALGAPIEKTISKAKGQPREPQVCTLPPSRDELTKNQVSLSCAVKGFYPSDIAVEWESNGQPENNYKTTPPVLDSDGSFFLVSKLTVDKSRWQQGNVFSCSVMHEALHNHYTQKSLSLSPGGGGGSGGGGSREGPELSPDDPAGLLDLRQGMFAQLVAQNVLLIDGPLSWYSDPGLAGVSLTGGLSYKEDTKELVVAKAGVYYVFFQLELRRVVAGEGSGSVSLALHLQPLRSAAGAAALALTVDLPPASSEARNSAFGFQGRLLHLSAGQRLGVHLHTEARARHAWQLTQGATVLGLFRVTPEIPAGL

SEQ ID NO: 191 - DNA, 2478 bp, Artificial Sequence
  Description of Artificial Sequence: Synthetic polynucleotide
  nucleotide sequence of anti- CEA(T84.66-LCHA) Fc hole dimeric 4-1BB ligand (71-248) chain
caggtgcagctggtgcagtctggcgccgaagtgaagaaacccggcagcagcgtgaaggtgtcctgcaaggccagcggcttcaacatcaaggacacctacatgcactgggtgcgccaggcccctggacagggactggaatggatgggcagaatcgaccccgccaacggcaacagcaaatacgtgcccaagttccagggcagagtgaccatcaccgccgacaccagcacctccaccgcctacatggaactgagcagcctgcggagcgaggacaccgccgtgtactactgtgcccccttcggctactacgtgtccgactacgccatggcctattggggccagggcacactcgtgaccgtgtcctctgctagcaccaagggcccctccgtgttccccctggcccccagcagcaagagcaccagcggcggcacagccgctctgggctgcctggtcaaggactacttccccgagcccgtgaccgtgtcctggaacagcggagccctgacctccggcgtgcacaccttccccgccgtgctgcagagttctggcctgtatagcctgagcagcgtggtcaccgtgccttctagcagcctgggcacccagacctacatctgcaacgtgaaccacaagcccagcaacaccaaggtggacaagaaggtggagcccaagagctgcgacaaaactcacacatgcccaccgtgcccagcacctgaagctgcagggggaccgtcagtcttcctcttccccccaaaacccaaggacaccctcatgatctcccggacccctgaggtcacatgcgtggtggtggacgtgagccacgaagaccctgaggtcaagttcaactggtacgtggacggcgtggaggtgcataatgccaagacaaagccgcgggaggagcagtacaacagcacgtaccgtgtggtcagcgtcctcaccgtcctgcaccaggactggctgaatggcaaggagtacaagtgcaaggtctccaacaaagccctcggcgcccccatcgagaaaaccatctccaaagccaaagggcagccccgagaaccacaggtgtgcaccctgcccccatcccgggatgagctgaccaagaaccaggtcagcctctcgtgcgcagtcaaaggcttctatcccagcgacatcgccgtggagtgggagagcaatgggcagccggagaacaactacaagaccacgcctcccgtgctggactccgacggctccttcttcctcgtgagcaagctcaccgtggacaagagcaggtggcagcaggggaacgtcttctcatgctccgtgatgcatgaggctctgcacaaccactacacgcagaagagcctctccctgtctccgggtggaggcggcggaagcggaggaggaggatccagagagggccctgagctgagccctgatgatcctgccggactgctggacctgcggcagggaatgtttgcccagctggtggcccagaacgtgctgctgatcgatggccccctgtcctggtacagcgatcctggactggctggcgtgtcactgacaggcggcctgagctacaaagaggacaccaaagaactggtggtggccaaggccggcgtgtactacgtgttctttcagctggaactgcggagagtggtggccggcgaaggatctggctctgtgtctctggccctgcatctgcagcctctgagatctgctgctggcgccgctgctctggcactgacagtggatctgcctcctgccagcagcgaggcccggaatagcgcatttgggtttcaaggcaggctgctgcacctgtctgccggccagaggctgggagtgcatctgcacacagaggccagggctagacacgcctggcagctgacacagggcgctacagtgctgggcctgttcagagtgacccccgagattccagcaggcctgggaggcggcggatctggcggcggaggatctagagaaggacccgagctgtcccccgacgatcccgctgggctgctggatctgagacagggcatgttcgctcagctggtggctcagaatgtgctgctgattgacggacctctgagctggtactccgacccagggctggcaggggtgtccctgactgggggactgtcctacaaagaagatacaaaagaactggtggtggctaaagctggggtgtactatgtgttttttcagctggaactgaggcgggtggtggctggggagggctcaggatctgtgtccctggctctgcatctgcagccactgcgctctgcagcaggggctgcagcactggccctgactgtggacctgcccccagcttcttccgaggccagaaacagcgccttcgggttccaaggacgcctgctgcatctgagcgccggacagcgcctgggagtgcatctgcatactgaagccagagcccggcatgcttggcagctgactcagggggcaactgtgctgggactgtttcgcgtgacacctgagatcccagccgggctc

SEQ ID NO: 192 - protein, 826 aa, Artificial Sequence
  Description of Artificial Sequence: Synthetic polypeptide
  anti- CEA(T84.66-LCHA) Fc hole dimeric 4-1BB (71-248) ligand chain
QVQLVQSGAEVKKPGSSVKVSCKASGFNIKDTYMHWVRQAPGQGLEWMGRIDPANGNSKYVPKFQGRVTITADTSTSTAYMELSSLRSEDTAVYYCAPFGYYVSDYAMAYWGQGTLVTVSSASTKGPSVFPLAPSSKSTSGGTAALGCLVKDYFPEPVTVSWNSGALTSGVHTFPAVLQSSGLYSLSSVVTVPSSSLGTQTYICNVNHKPSNTKVDKKVEPKSCDKTHTCPPCPAPEAAGGPSVFLFPPKPKDTLMISRTPEVTCVVVDVSHEDPEVKFNWYVDGVEVHNAKTKPREEQYNSTYRVVSVLTVLHQDWLNGKEYKCKVSNKALGAPIEKTISKAKGQPREPQVCTLPPSRDELTKNQVSLSCAVKGFYPSDIAVEWESNGQPENNYKTTPPVLDSDGSFFLVSKLTVDKSRWQQGNVFSCSVMHEALHNHYTQKSLSLSPGGGGGSGGGGSREGPELSPDDPAGLLDLRQGMFAQLVAQNVLLIDGPLSWYSDPGLAGVSLTGGLSYKEDTKELVVAKAGVYYVFFQLELRRVVAGEGSGSVSLALHLQPLRSAAGAAALALTVDLPPASSEARNSAFGFQGRLLHLSAGQRLGVHLHTEARARHAWQLTQGATVLGLFRVTPEIPAGLGGGGSGGGGSREGPELSPDDPAGLLDLRQGMFAQLVAQNVLLIDGPLSWYSDPGLAGVSLTGGLSYKEDTKELVVAKAGVYYVFFQLELRRVVAGEGSGSVSLALHLQPLRSAAGAAALALTVDLPPASSEARNSAFGFQGRLLHLSAGQRLGVHLHTEARARHAWQLTQGATVLGLFRVTPEIPAGL

SEQ ID NO: 193 - DNA, 1914 bp, Artificial Sequence
  Description of Artificial Sequence: Synthetic polynucleotide
  nucleotide sequence of anti- CEA(T84.66-LCHA) Fc hole monomeric 4-1BBL (71-248) chain
caggtgcagctggtgcagtctggcgccgaagtgaagaaacccggcagcagcgtgaaggtgtcctgcaaggccagcggcttcaacatcaaggacacctacatgcactgggtgcgccaggcccctggacagggactggaatggatgggcagaatcgaccccgccaacggcaacagcaaatacgtgcccaagttccagggcagagtgaccatcaccgccgacaccagcacctccaccgcctacatggaactgagcagcctgcggagcgaggacaccgccgtgtactactgtgcccccttcggctactacgtgtccgactacgccatggcctattggggccagggcacactcgtgaccgtgtcctctgctagcaccaagggcccctccgtgttccccctggcccccagcagcaagagcaccagcggcggcacagccgctctgggctgcctggtcaaggactacttccccgagcccgtgaccgtgtcctggaacagcggagccctgacctccggcgtgcacaccttccccgccgtgctgcagagttctggcctgtatagcctgagcagcgtggtcaccgtgccttctagcagcctgggcacccagacctacatctgcaacgtgaaccacaagcccagcaacaccaaggtggacaagaaggtggagcccaagagctgcgacaaaactcacacatgcccaccgtgcccagcacctgaagctgcagggggaccgtcagtcttcctcttccccccaaaacccaaggacaccctcatgatctcccggacccctgaggtcacatgcgtggtggtggacgtgagccacgaagaccctgaggtcaagttcaactggtacgtggacggcgtggaggtgcataatgccaagacaaagccgcgggaggagcagtacaacagcacgtaccgtgtggtcagcgtcctcaccgtcctgcaccaggactggctgaatggcaaggagtacaagtgcaaggtctccaacaaagccctcggcgcccccatcgagaaaaccatctccaaagccaaagggcagccccgagaaccacaggtgtgcaccctgcccccatcccgggatgagctgaccaagaaccaggtcagcctctcgtgcgcagtcaaaggcttctatcccagcgacatcgccgtggagtgggagagcaatgggcagccggagaacaactacaagaccacgcctcccgtgctggactccgacggctccttcttcctcgtgagcaagctcaccgtggacaagagcaggtggcagcaggggaacgtcttctcatgctccgtgatgcatgaggctctgcacaaccactacacgcagaagagcctctccctgtctccgggtggaggcggcggaagcggaggaggaggatccagagagggccctgagctgagccctgatgatcctgccggactgctggacctgcggcagggaatgtttgcccagctggtggcccagaacgtgctgctgatcgatggccccctgtcctggtacagcgatcctggactggctggcgtgtcactgacaggcggcctgagctacaaagaggacaccaaagaactggtggtggccaaggccggcgtgtactacgtgttctttcagctggaactgcggagagtggtggccggcgaaggatctggctctgtgtctctggccctgcatctgcagcctctgagatctgctgctggcgccgctgctctggcactgacagtggatctgcctcctgccagcagcgaggcccggaatagcgcatttgggtttcaaggcaggctgctgcacctgtctgccggccagaggctgggagtgcatctgcacacagaggccagggctagacacgcctggcagctgacacagggcgctacagtgctgggcctgttcagagtgacccccgagattcctgccgggctc

SEQ ID NO: 194 - protein, 638 aa, Artificial Sequence
  Description of Artificial Sequence: Synthetic polypeptide
  anti- CEA(T84.66-LCHA) Fc hole monomeric 4-1BB ligand (71-248) chain
QVQLVQSGAEVKKPGSSVKVSCKASGFNIKDTYMHWVRQAPGQGLEWMGRIDPANGNSKYVPKFQGRVTITADTSTSTAYMELSSLRSEDTAVYYCAPFGYYVSDYAMAYWGQGTLVTVSSASTKGPSVFPLAPSSKSTSGGTAALGCLVKDYFPEPVTVSWNSGALTSGVHTFPAVLQSSGLYSLSSVVTVPSSSLGTQTYICNVNHKPSNTKVDKKVEPKSCDKTHTCPPCPAPEAAGGPSVFLFPPKPKDTLMISRTPEVTCVVVDVSHEDPEVKFNWYVDGVEVHNAKTKPREEQYNSTYRVVSVLTVLHQDWLNGKEYKCKVSNKALGAPIEKTISKAKGQPREPQVCTLPPSRDELTKNQVSLSCAVKGFYPSDIAVEWESNGQPENNYKTTPPVLDSDGSFFLVSKLTVDKSRWQQGNVFSCSVMHEALHNHYTQKSLSLSPGGGGGSGGGGSREGPELSPDDPAGLLDLRQGMFAQLVAQNVLLIDGPLSWYSDPGLAGVSLTGGLSYKEDTKELVVAKAGVYYVFFQLELRRVVAGEGSGSVSLALHLQPLRSAAGAAALALTVDLPPASSEARNSAFGFQGRLLHLSAGQRLGVHLHTEARARHAWQLTQGATVLGLFRVTPEIPAGL

SEQ ID NO: 195 - DNA, 2460 bp, Artificial Sequence
  Description of Artificial Sequence: Synthetic polynucleotide
  nucleotide sequence of DP47 Fc hole dimeric 4-1BB ligand (71-248) chain
gaggtgcaattgttggagtctgggggaggcttggtacagcctggggggtccctgagactctcctgtgcagcctccggattcacctttagcagttatgccatgagctgggtccgccaggctccagggaaggggctggagtgggtctcagctattagtggtagtggtggtagcacatactacgcagactccgtgaagggccggttcaccatctccagagacaattccaagaacacgctgtatctgcagatgaacagcctgagagccgaggacacggccgtatattactgtgcgaaaggcagcggatttgactactggggccaaggaaccctggtcaccgtctcgagtgctagcaccaagggcccctccgtgttccccctggcccccagcagcaagagcaccagcggcggcacagccgctctgggctgcctggtcaaggactacttccccgagcccgtgaccgtgtcctggaacagcggagccctgacctccggcgtgcacaccttccccgccgtgctgcagagttctggcctgtatagcctgagcagcgtggtcaccgtgccttctagcagcctgggcacccagacctacatctgcaacgtgaaccacaagcccagcaacaccaaggtggacaagaaggtggagcccaagagctgcgacaaaactcacacatgcccaccgtgcccagcacctgaagctgcagggggaccgtcagtcttcctcttccccccaaaacccaaggacaccctcatgatctcccggacccctgaggtcacatgcgtggtggtggacgtgagccacgaagaccctgaggtcaagttcaactggtacgtggacggcgtggaggtgcataatgccaagacaaagccgcgggaggagcagtacaacagcacgtaccgtgtggtcagcgtcctcaccgtcctgcaccaggactggctgaatggcaaggagtacaagtgcaaggtctccaacaaagccctcggcgcccccatcgagaaaaccatctccaaagccaaagggcagccccgagaaccacaggtgtgcaccctgcccccatcccgggatgagctgaccaagaaccaggtcagcctctcgtgcgcagtcaaaggcttctatcccagcgacatcgccgtggagtgggagagcaatgggcagccggagaacaactacaagaccacgcctcccgtgctggactccgacggctccttcttcctcgtgagcaagctcaccgtggacaagagcaggtggcagcaggggaacgtcttctcatgctccgtgatgcatgaggctctgcacaaccactacacgcagaagagcctctccctgtctccgggtggaggcggcggaagcggaggaggaggatccagagagggccctgagctgagccctgatgatcctgccggactgctggacctgcggcagggaatgtttgcccagctggtggcccagaacgtgctgctgatcgatggccccctgtcctggtacagcgatcctggactggctggcgtgtcactgacaggcggcctgagctacaaagaggacaccaaagaactggtggtggccaaggccggcgtgtactacgtgttctttcagctggaactgcggagagtggtggccggcgaaggatctggctctgtgtctctggccctgcatctgcagcctctgagatctgctgctggcgccgctgctctggcactgacagtggatctgcctcctgccagcagcgaggcccggaatagcgcatttgggtttcaaggcaggctgctgcacctgtctgccggccagaggctgggagtgcatctgcacacagaggccagggctagacacgcctggcagctgacacagggcgctacagtgctgggcctgttcagagtgacccccgagattccagcaggcctgggaggcggcggatctggcggcggaggatctagagaaggacccgagctgtcccccgacgatcccgctgggctgctggatctgagacagggcatgttcgctcagctggtggctcagaatgtgctgctgattgacggacctctgagctggtactccgacccagggctggcaggggtgtccctgactgggggactgtcctacaaagaagatacaaaagaactggtggtggctaaagctggggtgtactatgtgttttttcagctggaactgaggcgggtggtggctggggagggctcaggatctgtgtccctggctctgcatctgcagccactgcgctctgcagcaggggctgcagcactggccctgactgtggacctgcccccagcttcttccgaggccagaaacagcgccttcgggttccaaggacgcctgctgcatctgagcgccggacagcgcctgggagtgcatctgcatactgaagccagagcccggcatgcttggcagctgactcagggggcaactgtgctgggactgtttcgcgtgacacctgagatcccagccgggctc

SEQ ID NO: 196 - protein, 820 aa, Artificial Sequence
  Description of Artificial Sequence: Synthetic polypeptide
  DP47 Fc hole dimeric 4-1BB ligand (71-248) chain
EVQLLESGGGLVQPGGSLRLSCAASGFTFSSYAMSWVRQAPGKGLEWVSAISGSGGSTYYADSVKGRFTISRDNSKNTLYLQMNSLRAEDTAVYYCAKGSGFDYWGQGTLVTVSSASTKGPSVFPLAPSSKSTSGGTAALGCLVKDYFPEPVTVSWNSGALTSGVHTFPAVLQSSGLYSLSSVVTVPSSSLGTQTYICNVNHKPSNTKVDKKVEPKSCDKTHTCPPCPAPEAAGGPSVFLFPPKPKDTLMISRTPEVTCVVVDVSHEDPEVKFNWYVDGVEVHNAKTKPREEQYNSTYRVVSVLTVLHQDWLNGKEYKCKVSNKALGAPIEKTISKAKGQPREPQVCTLPPSRDELTKNQVSLSCAVKGFYPSDIAVEWESNGQPENNYKTTPPVLDSDGSFFLVSKLTVDKSRWQQGNVFSCSVMHEALHNHYTQKSLSLSPGGGGGSGGGGSREGPELSPDDPAGLLDLRQGMFAQLVAQNVLLIDGPLSWYSDPGLAGVSLTGGLSYKEDTKELVVAKAGVYYVFFQLELRRVVAGEGSGSVSLALHLQPLRSAAGAAALALTVDLPPASSEARNSAFGFQGRLLHLSAGQRLGVHLHTEARARHAWQLTQGATVLGLFRVTPEIPAGLGGGGSGGGGSREGPELSPDDPAGLLDLRQGMFAQLVAQNVLLIDGPLSWYSDPGLAGVSLTGGLSYKEDTKELVVAKAGVYYVFFQLELRRVVAGEGSGSVSLALHLQPLRSAAGAAALALTVDLPPASSEARNSAFGFQGRLLHLSAGQRLGVHLHTEARARHAWQLTQGATVLGLFRVTPEIPAGL

SEQ ID NO: 197 - DNA, 1896 bp, Artificial Sequence
  Description of Artificial Sequence: Synthetic polynucleotide
  nucleotide sequence of DP47 Fc hole monomeric 4-1BBL (71-248) chain
gaggtgcaattgttggagtctgggggaggcttggtacagcctggggggtccctgagactctcctgtgcagcctccggattcacctttagcagttatgccatgagctgggtccgccaggctccagggaaggggctggagtgggtctcagctattagtggtagtggtggtagcacatactacgcagactccgtgaagggccggttcaccatctccagagacaattccaagaacacgctgtatctgcagatgaacagcctgagagccgaggacacggccgtatattactgtgcgaaaggcagcggatttgactactggggccaaggaaccctggtcaccgtctcgagtgctagcaccaagggcccctccgtgttccccctggcccccagcagcaagagcaccagcggcggcacagccgctctgggctgcctggtcaaggactacttccccgagcccgtgaccgtgtcctggaacagcggagccctgacctccggcgtgcacaccttccccgccgtgctgcagagttctggcctgtatagcctgagcagcgtggtcaccgtgccttctagcagcctgggcacccagacctacatctgcaacgtgaaccacaagcccagcaacaccaaggtggacaagaaggtggagcccaagagctgcgacaaaactcacacatgcccaccgtgcccagcacctgaagctgcagggggaccgtcagtcttcctcttccccccaaaacccaaggacaccctcatgatctcccggacccctgaggtcacatgcgtggtggtggacgtgagccacgaagaccctgaggtcaagttcaactggtacgtggacggcgtggaggtgcataatgccaagacaaagccgcgggaggagcagtacaacagcacgtaccgtgtggtcagcgtcctcaccgtcctgcaccaggactggctgaatggcaaggagtacaagtgcaaggtctccaacaaagccctcggcgcccccatcgagaaaaccatctccaaagccaaagggcagccccgagaaccacaggtgtgcaccctgcccccatcccgggatgagctgaccaagaaccaggtcagcctctcgtgcgcagtcaaaggcttctatcccagcgacatcgccgtggagtgggagagcaatgggcagccggagaacaactacaagaccacgcctcccgtgctggactccgacggctccttcttcctcgtgagcaagctcaccgtggacaagagcaggtggcagcaggggaacgtcttctcatgctccgtgatgcatgaggctctgcacaaccactacacgcagaagagcctctccctgtctccgggtggaggcggcggaagcggaggaggaggatccagagagggccctgagctgagccctgatgatcctgccggactgctggacctgcggcagggaatgtttgcccagctggtggcccagaacgtgctgctgatcgatggccccctgtcctggtacagcgatcctggactggctggcgtgtcactgacaggcggcctgagctacaaagaggacaccaaagaactggtggtggccaaggccggcgtgtactacgtgttctttcagctggaactgcggagagtggtggccggcgaaggatctggctctgtgtctctggccctgcatctgcagcctctgagatctgctgctggcgccgctgctctggcactgacagtggatctgcctcctgccagcagcgaggcccggaatagcgcatttgggtttcaaggcaggctgctgcacctgtctgccggccagaggctgggagtgcatctgcacacagaggccagggctagacacgcctggcagctgacacagggcgctacagtgctgggcctgttcagagtgacccccgagattcctgccgggctc

SEQ ID NO: 198 - protein, 632 aa, Artificial Sequence
  Description of Artificial Sequence: Synthetic polypeptide
  DP47 Fc hole monomeric 4-1BBL (71-248) chain
EVQLLESGGGLVQPGGSLRLSCAASGFTFSSYAMSWVRQAPGKGLEWVSAISGSGGSTYYADSVKGRFTISRDNSKNTLYLQMNSLRAEDTAVYYCAKGSGFDYWGQGTLVTVSSASTKGPSVFPLAPSSKSTSGGTAALGCLVKDYFPEPVTVSWNSGALTSGVHTFPAVLQSSGLYSLSSVVTVPSSSLGTQTYICNVNHKPSNTKVDKKVEPKSCDKTHTCPPCPAPEAAGGPSVFLFPPKPKDTLMISRTPEVTCVVVDVSHEDPEVKFNWYVDGVEVHNAKTKPREEQYNSTYRVVSVLTVLHQDWLNGKEYKCKVSNKALGAPIEKTISKAKGQPREPQVCTLPPSRDELTKNQVSLSCAVKGFYPSDIAVEWESNGQPENNYKTTPPVLDSDGSFFLVSKLTVDKSRWQQGNVFSCSVMHEALHNHYTQKSLSLSPGGGGGSGGGGSREGPELSPDDPAGLLDLRQGMFAQLVAQNVLLIDGPLSWYSDPGLAGVSLTGGLSYKEDTKELVVAKAGVYYVFFQLELRRVVAGEGSGSVSLALHLQPLRSAAGAAALALTVDLPPASSEARNSAFGFQGRLLHLSAGQRLGVHLHTEARARHAWQLTQGATVLGLFRVTPEIPAGL

SEQ ID NO: 199 - DNA, 2130 bp, Artificial Sequence
  Description of Artificial Sequence: Synthetic polynucleotide
  nucleotide sequence of dimeric 4-1BB ligand (71-248) - CL* Fc knob chain
agagagggccctgagctgagccccgatgatcctgctggactgctggacctgcggcagggcatgtttgctcagctggtggcccagaacgtgctgctgatcgatggccccctgtcctggtacagcgatcctggactggctggcgtgtcactgacaggcggcctgagctacaaagaggacaccaaagaactggtggtggccaaggccggcgtgtactacgtgttctttcagctggaactgcggagagtggtggccggcgaaggatctggctctgtgtctctggccctgcatctgcagcctctgagatctgctgctggcgccgctgctctggcactgacagtggatctgcctcctgccagcagcgaggcccggaatagcgcatttgggtttcaaggcaggctgctgcacctgtctgccggccagaggctgggagtgcatctgcacacagaggccagggctagacacgcctggcagctgacacagggcgctacagtgctgggcctgttcagagtgacccccgagattccagccggactgggaggcggcggatctggcggcggaggatctagagaaggacccgagctgtcccctgacgatccagccgggctgctggatctgagacagggaatgttcgcccagctggtggctcagaatgtgctgctgattgacggacctctgagctggtactccgacccagggctggcaggggtgtccctgactgggggactgtcctacaaagaagatacaaaagaactggtggtggctaaagctggggtgtactatgtgttttttcagctggaactgaggcgggtggtggctggggagggctcaggatctgtgtccctggctctgcatctgcagccactgcgctctgcagcaggggctgcagcactggccctgactgtggacctgcccccagcttcttccgaggccagaaacagcgccttcgggttccaaggacgcctgctgcatctgagcgccggacagcgcctgggagtgcatctgcatactgaagccagagcccggcatgcttggcagctgactcagggggcaactgtgctgggactgtttcgcgtgacacctgagatccccgctggactgggcggaggcggttccggagggggaggatctcgtacggtggctgcaccatctgtctttatcttcccacccagcgaccggaagctgaagtctggcacagccagcgtcgtgtgcctgctgaataacttctacccccgcgaggccaaggtgcagtggaaggtggacaatgccctgcagagcggcaacagccaggaaagcgtgaccgagcaggacagcaaggactccacctacagcctgagcagcaccctgaccctgagcaaggccgactacgagaagcacaaggtgtacgcctgcgaagtgacccaccagggcctgtctagccccgtgaccaagagcttcaaccggggcgagtgcgacaagacccacacctgtcctccatgccctgcccctgaagctgctggcggccctagcgtgttcctgttccccccaaagcccaaggacaccctgatgatcagccggacccctgaagtgacctgcgtggtggtggatgtgtcccacgaggaccctgaagtgaagttcaattggtacgtggacggcgtggaagtgcacaatgccaagaccaagccgcgggaggagcagtacaacagcacgtaccgtgtggtcagcgtcctcaccgtcctgcaccaggactggctgaatggcaaggagtacaagtgcaaggtctccaacaaagccctcggcgcccccatcgagaaaaccatctccaaagccaaagggcagccccgagaaccacaggtgtacaccctgcccccatgccgggatgagctgaccaagaaccaggtcagcctgtggtgcctggtcaaaggcttctatcccagcgacatcgccgtggagtgggagagcaatgggcagccggagaacaactacaagaccacgcctcccgtgctggactccgacggctccttcttcctctacagcaagctcaccgtggacaagagcaggtggcagcaggggaacgtcttctcatgctccgtgatgcatgaggctctgcacaaccactacacgcagaagagcctctccctgtctccgggtaaa

SEQ ID NO: 200 - DNA, 873 bp, Artificial Sequence
  Description of Artificial Sequence: Synthetic polynucleotide
  nucleotide sequence of monomeric 4-1BBL (71-248) -CH1*
agagagggccctgagctgagccccgatgatcctgctggactgctggacctgcggcagggcatgtttgctcagctggtggcccagaacgtgctgctgatcgatggccccctgtcctggtacagcgatcctggactggctggcgtgtcactgacaggcggcctgagctacaaagaggacaccaaagaactggtggtggccaaggccggcgtgtactacgtgttctttcagctggaactgcggagagtggtggccggcgaaggatctggctctgtgtctctggccctgcatctgcagcctctgagatctgctgctggcgccgctgctctggcactgacagtggatctgcctcctgccagcagcgaggcccggaatagcgcatttgggtttcaaggcaggctgctgcacctgtctgccggccagaggctgggagtgcatctgcacacagaggccagggctagacacgcctggcagctgacacagggcgctacagtgctgggcctgttcagagtgacccccgagattccagccggactgggaggcggaggttccggaggcggaggatctgctagcacaaagggccccagcgtgttccctctggcccctagcagcaagagcacatctggcggaacagccgccctgggctgcctggtggaagattacttccccgagcccgtgaccgtgtcctggaattctggcgccctgacaagcggcgtgcacacctttccagccgtgctgcagagcagcggcctgtactctctgagcagcgtcgtgacagtgcccagcagctctctgggcacccagacctacatctgcaacgtgaaccacaagcccagcaacaccaaggtggacgagaaggtggaacccaagtcctgc

SEQ ID NO: 201 - DNA, 1335 bp, Artificial Sequence
  Description of Artificial Sequence: Synthetic polynucleotide
  nucleotide sequence of DP47 Fc hole chain
gaggtgcaattgttggagtctgggggaggcttggtacagcctggggggtccctgagactctcctgtgcagcctccggattcacctttagcagttatgccatgagctgggtccgccaggctccagggaaggggctggagtgggtctcagctattagtggtagtggtggtagcacatactacgcagactccgtgaagggccggttcaccatctccagagacaattccaagaacacgctgtatctgcagatgaacagcctgagagccgaggacacggccgtatattactgtgcgaaaggcagcggatttgactactggggccaaggaaccctggtcaccgtctcgagtgctagcaccaagggcccatcggtcttccccctggcaccctcctccaagagcacctctgggggcacagcggccctgggctgcctggtcaaggactacttccccgaaccggtgacggtgtcgtggaactcaggcgccctgaccagcggcgtgcacaccttcccggctgtcctacagtcctcaggactctactccctcagcagcgtggtgaccgtgccctccagcagcttgggcacccagacctacatctgcaacgtgaatcacaagcccagcaacaccaaggtggacaagaaagttgagcccaaatcttgtgacaaaactcacacatgcccaccgtgcccagcacctgaagctgcagggggaccgtcagtcttcctcttccccccaaaacccaaggacaccctcatgatctcccggacccctgaggtcacatgcgtggtggtggacgtgagccacgaagaccctgaggtcaagttcaactggtacgtggacggcgtggaggtgcataatgccaagacaaagccgcgggaggagcagtacaacagcacgtaccgtgtggtcagcgtcctcaccgtcctgcaccaggactggctgaatggcaaggagtacaagtgcaaggtctccaacaaagccctcggcgcccccatcgagaaaaccatctccaaagccaaagggcagccccgagaaccacaggtgtgcaccctgcccccatcccgggatgagctgaccaagaaccaggtcagcctctcgtgcgcagtcaaaggcttctatcccagcgacatcgccgtggagtgggagagcaatgggcagccggagaacaactacaagaccacgcctcccgtgctggactccgacggctccttcttcctcgtgagcaagctcaccgtggacaagagcaggtggcagcaggggaacgtcttctcatgctccgtgatgcatgaggctctgcacaaccactacacgcagaagagcctctccctgtctccgggtaaa

SEQ ID NO: 202 - protein, 710 aa, Artificial Sequence
  Description of Artificial Sequence: Synthetic polypeptide
  dimeric 4-1BB ligand (71-248) - CL* Fc knob chain
REGPELSPDDPAGLLDLRQGMFAQLVAQNVLLIDGPLSWYSDPGLAGVSLTGGLSYKEDTKELVVAKAGVYYVFFQLELRRVVAGEGSGSVSLALHLQPLRSAAGAAALALTVDLPPASSEARNSAFGFQGRLLHLSAGQRLGVHLHTEARARHAWQLTQGATVLGLFRVTPEIPAGLGGGGSGGGGSREGPELSPDDPAGLLDLRQGMFAQLVAQNVLLIDGPLSWYSDPGLAGVSLTGGLSYKEDTKELVVAKAGVYYVFFQLELRRVVAGEGSGSVSLALHLQPLRSAAGAAALALTVDLPPASSEARNSAFGFQGRLLHLSAGQRLGVHLHTEARARHAWQLTQGATVLGLFRVTPEIPAGLGGGGSGGGGSRTVAAPSVFIFPPSDRKLKSGTASVVCLLNNFYPREAKVQWKVDNALQSGNSQESVTEQDSKDSTYSLSSTLTLSKADYEKHKVYACEVTHQGLSSPVTKSFNRGECDKTHTCPPCPAPEAAGGPSVFLFPPKPKDTLMISRTPEVTCVVVDVSHEDPEVKFNWYVDGVEVHNAKTKPREEQYNSTYRVVSVLTVLHQDWLNGKEYKCKVSNKALGAPIEKTISKAKGQPREPQVYTLPPCRDELTKNQVSLWCLVKGFYPSDIAVEWESNGQPENNYKTTPPVLDSDGSFFLYSKLTVDKSRWQQGNVFSCSVMHEALHNHYTQKSLSLSPGK

SEQ ID NO: 203 - protein, 291 aa, Artificial Sequence
  Description of Artificial Sequence: Synthetic polypeptide
  monomeric 4-1BBL (71-248) -CH1*
REGPELSPDDPAGLLDLRQGMFAQLVAQNVLLIDGPLSWYSDPGLAGVSLTGGLSYKEDTKELVVAKAGVYYVFFQLELRRVVAGEGSGSVSLALHLQPLRSAAGAAALALTVDLPPASSEARNSAFGFQGRLLHLSAGQRLGVHLHTEARARHAWQLTQGATVLGLFRVTPEIPAGLGGGGSGGGGSASTKGPSVFPLAPSSKSTSGGTAALGCLVEDYFPEPVTVSWNSGALTSGVHTFPAVLQSSGLYSLSSVVTVPSSSLGTQTYICNVNHKPSNTKVDEKVEPKSC

SEQ ID NO: 204 - protein, 445 aa, Artificial Sequence
  Description of Artificial Sequence: Synthetic polypeptide
  DP47 Fc hole chain
EVQLLESGGGLVQPGGSLRLSCAASGFTFSSYAMSWVRQAPGKGLEWVSAISGSGGSTYYADSVKGRFTISRDNSKNTLYLQMNSLRAEDTAVYYCAKGSGFDYWGQGTLVTVSSASTKGPSVFPLAPSSKSTSGGTAALGCLVKDYFPEPVTVSWNSGALTSGVHTFPAVLQSSGLYSLSSVVTVPSSSLGTQTYICNVNHKPSNTKVDKKVEPKSCDKTHTCPPCPAPEAAGGPSVFLFPPKPKDTLMISRTPEVTCVVVDVSHEDPEVKFNWYVDGVEVHNAKTKPREEQYNSTYRVVSVLTVLHQDWLNGKEYKCKVSNKALGAPIEKTISKAKGQPREPQVCTLPPSRDELTKNQVSLSCAVKGFYPSDIAVEWESNGQPENNYKTTPPVLDSDGSFFLVSKLTVDKSRWQQGNVFSCSVMHEALHNHYTQKSLSLSPGK

SEQ ID NO: 205 - DNA, 1335 bp, Artificial Sequence
  Description of Artificial Sequence: Synthetic polynucleotide
  nucleotide sequence of DP47 heavy chain (huIgG1 PGLALA)
gaggtgcaattgttggagtctgggggaggcttggtacagcctggggggtccctgagactctcctgtgcagcctccggattcacctttagcagttatgccatgagctgggtccgccaggctccagggaaggggctggagtgggtctcagctattagtggtagtggtggtagcacatactacgcagactccgtgaagggccggttcaccatctccagagacaattccaagaacacgctgtatctgcagatgaacagcctgagagccgaggacacggccgtatattactgtgcgaaaggcagcggatttgactactggggccaaggaaccctggtcaccgtctcgagtgctagcaccaagggcccatcggtcttccccctggcaccctcctccaagagcacctctgggggcacagcggccctgggctgcctggtcaaggactacttccccgaaccggtgacggtgtcgtggaactcaggcgccctgaccagcggcgtgcacaccttcccggctgtcctacagtcctcaggactctactccctcagcagcgtggtgaccgtgccctccagcagcttgggcacccagacctacatctgcaacgtgaatcacaagcccagcaacaccaaggtggacaagaaagttgagcccaaatcttgtgacaaaactcacacatgcccaccgtgcccagcacctgaagctgcagggggaccgtcagtcttcctcttccccccaaaacccaaggacaccctcatgatctcccggacccctgaggtcacatgcgtggtggtggacgtgagccacgaagaccctgaggtcaagttcaactggtacgtggacggcgtggaggtgcataatgccaagacaaagccgcgggaggagcagtacaacagcacgtaccgtgtggtcagcgtcctcaccgtcctgcaccaggactggctgaatggcaaggagtacaagtgcaaggtctccaacaaagccctcggcgcccccatcgagaaaaccatctccaaagccaaagggcagccccgagaaccacaggtgtacaccctgcccccatcccgggatgagctgaccaagaaccaggtcagcctgacctgcctggtcaaaggcttctatcccagcgacatcgccgtggagtgggagagcaatgggcagccggagaacaactacaagaccacgcctcccgtgctggactccgacggctccttcttcctctacagcaagctcaccgtggacaagagcaggtggcagcaggggaacgtcttctcatgctccgtgatgcatgaggctctgcacaaccactacacgcagaagagcctctccctgtctccgggtaaa

SEQ ID NO: 206 - protein, 445 aa, Artificial Sequence
  Description of Artificial Sequence: Synthetic polypeptide
  DP47 heavy chain (huIgG1 PGLALA)
EVQLLESGGGLVQPGGSLRLSCAASGFTFSSYAMSWVRQAPGKGLEWVSAISGSGGSTYYADSVKGRFTISRDNSKNTLYLQMNSLRAEDTAVYYCAKGSGFDYWGQGTLVTVSSASTKGPSVFPLAPSSKSTSGGTAALGCLVKDYFPEPVTVSWNSGALTSGVHTFPAVLQSSGLYSLSSVVTVPSSSLGTQTYICNVNHKPSNTKVDKKVEPKSCDKTHTCPPCPAPEAAGGPSVFLFPPKPKDTLMISRTPEVTCVVVDVSHEDPEVKFNWYVDGVEVHNAKTKPREEQYNSTYRVVSVLTVLHQDWLNGKEYKCKVSNKALGAPIEKTISKAKGQPREPQVYTLPPSRDELTKNQVSLTCLVKGFYPSDIAVEWESNGQPENNYKTTPPVLDSDGSFFLYSKLTVDKSRWQQGNVFSCSVMHEALHNHYTQKSLSLSPGK

SEQ ID NO: 207 - DNA, 594 bp, Artificial Sequence
  Description of Artificial Sequence: Synthetic polynucleotide
  nucleotide sequence of human 4-1BB His
ctgcaggacccctgcagcaactgccctgccggcaccttctgcgacaacaaccggaaccagatctgcagcccctgcccccccaacagcttcagctctgccggcggacagcggacctgcgacatctgcagacagtgcaagggcgtgttcagaacccggaaagagtgcagcagcaccagcaacgccgagtgcgactgcacccccggcttccattgtctgggagccggctgcagcatgtgcgagcaggactgcaagcagggccaggaactgaccaagaagggctgcaaggactgctgcttcggcaccttcaacgaccagaagcggggcatctgccggccctggaccaactgtagcctggacggcaagagcgtgctggtcaacggcaccaaagaacgggacgtcgtgtgcggccccagccctgctgatctgtctcctggggccagcagcgtgacccctcctgcccctgccagagagcctggccactctcctcaggtcgacgaacagttatattttcagggcggctcaggcctgaacgacatcttcgaggcccagaagatcgagtggcacgaggctcgagctcaccaccatcaccatcac

SEQ ID NO: 208 - protein, 198 aa, Artificial Sequence
  Description of Artificial Sequence: Synthetic polypeptide
  human 4-1BB His
LQDPCSNCPAGTFCDNNRNQICSPCPPNSFSSAGGQRTCDICRQCKGVFRTRKECSSTSNAECDCTPGFHCLGAGCSMCEQDCKQGQELTKKGCKDCCFGTFNDQKRGICRPWTNCSLDGKSVLVNGTKERDVVCGPSPADLSPGASSVTPPAPAREPGHSPQVDEQLYFQGGSGLNDIFEAQKIEWHEARAHHHHHH

SEQ ID NO: 209 - DNA, 2502 bp, Artificial Sequence
  Description of Artificial Sequence: Synthetic polynucleotide
  nucleotide sequence of anti-FAP(4B9) Fc hole dimeric 4-1BB ligand (71-254) chain
gaggtgcagctgctcgaaagcggcggaggactggtgcagcctggcggcagcctgagactgtcttgcgccgccagcggcttcaccttcagcagctacgccatgagctgggtccgccaggcccctggcaagggactggaatgggtgtccgccatcatcggctctggcgccagcacctactacgccgacagcgtgaagggccggttcaccatcagccgggacaacagcaagaacaccctgtacctgcagatgaacagcctgcgggccgaggacaccgccgtgtactactgcgccaagggatggttcggcggcttcaactactggggacagggcaccctggtcacagtgtccagcgctagcaccaagggcccctccgtgttccccctggcccccagcagcaagagcaccagcggcggcacagccgctctgggctgcctggtcaaggactacttccccgagcccgtgaccgtgtcctggaacagcggagccctgacctccggcgtgcacaccttccccgccgtgctgcagagttctggcctgtatagcctgagcagcgtggtcaccgtgccttctagcagcctgggcacccagacctacatctgcaacgtgaaccacaagcccagcaacaccaaggtggacaagaaggtggagcccaagagctgcgacaaaactcacacatgcccaccgtgcccagcacctgaagctgcagggggaccgtcagtcttcctcttccccccaaaacccaaggacaccctcatgatctcccggacccctgaggtcacatgcgtggtggtggacgtgagccacgaagaccctgaggtcaagttcaactggtacgtggacggcgtggaggtgcataatgccaagacaaagccgcgggaggagcagtacaacagcacgtaccgtgtggtcagcgtcctcaccgtcctgcaccaggactggctgaatggcaaggagtacaagtgcaaggtctccaacaaagccctcggcgcccccatcgagaaaaccatctccaaagccaaagggcagccccgagaaccacaggtgtgcaccctgcccccatcccgggatgagctgaccaagaaccaggtcagcctctcgtgcgcagtcaaaggcttctatcccagcgacatcgccgtggagtgggagagcaatgggcagccggagaacaactacaagaccacgcctcccgtgctggactccgacggctccttcttcctcgtgagcaagctcaccgtggacaagagcaggtggcagcaggggaacgtcttctcatgctccgtgatgcatgaggctctgcacaaccactacacgcagaagagcctctccctgtctccgggtggaggcggcggaagcggaggaggaggatccagagagggccctgagctgagccccgatgatcctgctggactgctggacctgcggcagggcatgtttgctcagctggtggcccagaacgtgctgctgatcgatggccccctgtcctggtacagcgatcctggactggctggcgtgtcactgacaggcggcctgagctacaaagaggacaccaaagaactggtggtggccaaggccggcgtgtactacgtgttctttcagctggaactgcggagagtggtggccggcgaaggatctggctctgtgtctctggccctgcatctgcagcctctgagaagcgctgctggcgctgcagctctggcactgacagtggatctgcctcctgccagctccgaggcccggaatagcgcatttgggtttcaaggcaggctgctgcacctgtctgccggccagaggctgggagtgcatctgcacacagaggccagggctagacacgcctggcagctgacacagggcgctacagtgctgggcctgttcagagtgacccccgagattccagccggcctgccttctccaagaagcgaaggcggaggcggatctggcggcggaggatctagagagggacccgaactgtcccctgacgatccagccgggctgctggatctgagacagggaatgttcgcccagctggtggctcagaatgtgctgctgattgacggacctctgagctggtactccgacccagggctggcaggggtgtccctgactgggggactgtcctacaaagaagatacaaaagaactggtggtggctaaagctggggtgtactatgtgttttttcagctggaactgaggcgggtggtggctggggagggctcaggatctgtgtccctggctctgcatctgcagccactgcgctctgctgctggcgcagctgcactggctctgactgtggacctgccaccagcctctagcgaggccagaaacagcgccttcgggttccaaggacgcctgctgcatctgagcgccggacagcgcctgggagtgcatctgcatactgaagccagagcccggcatgcttggcagctgactcagggggcaactgtgctgggactgtttcgcgtgacacctgagatccctgccggactgccaagccctagatcagaa

SEQ ID NO: 210 - DNA, 1926 bp, Artificial Sequence
  Description of Artificial Sequence: Synthetic polynucleotide
  nucleotide sequence of DP47 (VHCL) Fc knob monomeric 4-1BB (71-254) ligand
gaggtgcaattgttggagtctgggggaggcttggtacagcctggggggtccctgagactctcctgtgcagcctccggattcacctttagcagttatgccatgagctgggtccgccaggctccagggaaggggctggagtgggtctcagctattagtggtagtggtggtagcacatactacgcagactccgtgaagggccggttcaccatctccagagacaattccaagaacacgctgtatctgcagatgaacagcctgagagccgaggacacggccgtatattactgtgcgaaaggcagcggatttgactactggggccaaggaaccctggtcaccgtctcgagcgctagtgtggccgctccctccgtgtttatctttcccccatccgatgaacagctgaaaagcggcaccgcctccgtcgtgtgtctgctgaacaatttttaccctagggaagctaaagtgcagtggaaagtggataacgcactgcagtccggcaactcccaggaatctgtgacagaacaggactccaaggacagcacctactccctgtcctccaccctgacactgtctaaggctgattatgagaaacacaaagtctacgcctgcgaagtcacccatcagggcctgagctcgcccgtcacaaagagcttcaacaggggagagtgtgacaagacccacacctgtcccccttgtcctgcccctgaagctgctggcggcccttctgtgttcctgttccccccaaagcccaaggacaccctgatgatcagccggacccccgaagtgacctgcgtggtggtggatgtgtcccacgaggaccctgaagtgaagttcaattggtacgtggacggcgtggaagtgcacaacgccaagacaaagccgcgggaggagcagtacaacagcacgtaccgtgtggtcagcgtcctcaccgtcctgcaccaggactggctgaatggcaaggagtacaagtgcaaggtctccaacaaagccctcggcgcccccatcgagaaaaccatctccaaagccaaagggcagccccgagaaccacaggtgtacaccctgcccccctgcagagatgagctgaccaagaaccaggtgtccctgtggtgtctggtcaagggcttctaccccagcgatatcgccgtggagtgggagagcaacggccagcctgagaacaactacaagaccaccccccctgtgctggacagcgacggcagcttcttcctgtactccaaactgaccgtggacaagagccggtggcagcagggcaacgtgttcagctgcagcgtgatgcacgaggccctgcacaaccactacacccagaagtccctgagcctgagccccggcggaggcggcggaagcggaggaggaggatccagagagggccctgagctgagccccgatgatcctgctggactgctggacctgcggcagggcatgtttgctcagctggtggcccagaacgtgctgctgatcgatggccccctgtcctggtacagcgatcctggactggctggcgtgtcactgacaggcggcctgagctacaaagaggacaccaaagaactggtggtggccaaggccggcgtgtactacgtgttctttcagctggaactgcggagagtggtggccggcgaaggatctggctctgtgtctctggccctgcatctgcagcctctgagaagcgctgctggcgctgcagctctggcactgacagtggatctgcctcctgccagctccgaggcccggaatagcgcatttgggtttcaaggcaggctgctgcacctgtctgccggccagaggctgggagtgcatctgcacacagaggccagggctagacacgcctggcagctgacacagggcgctacagtgctgggcctgttcagagtgacccccgagattccagccggcctgccttctccaagaagcgaa

SEQ ID NO: 211 - DNA, 639 bp, Artificial Sequence
  Description of Artificial Sequence: Synthetic polynucleotide
  nucleotide sequence of DP47 (VL-CH1) light chain
gaaatcgtgttaacgcagtctccaggcaccctgtctttgtctccaggggaaagagccaccctctcttgcagggccagtcagagtgttagcagcagctacttagcctggtaccagcagaaacctggccaggctcccaggctcctcatctatggagcatccagcagggccactggcatcccagacaggttcagtggcagtggatccgggacagacttcactctcaccatcagcagactggagcctgaagattttgcagtgtattactgtcagcagtatggtagctcaccgctgacgttcggccaggggaccaaagtggaaatcaagagctccgctagcaccaaaggcccttccgtgtttcctctggctcctagctccaagtccacctctggaggcaccgctgctctcggatgcctcgtgaaggattattttcctgagcctgtgacagtgtcctggaatagcggagcactgacctctggagtgcatactttccccgctgtgctgcagtcctctggactgtacagcctgagcagcgtggtgacagtgcccagcagcagcctgggcacccagacctacatctgcaacgtgaaccacaagcccagcaacaccaaggtggacaagaaggtggaacccaagtcttgt

SEQ ID NO: 212 - protein, 834 aa, Artificial Sequence
  Description of Artificial Sequence: Synthetic polypeptide
  anti-FAP(4B9) Fc hole dimeric 4-1BB ligand (71-254) chain
EVQLLESGGGLVQPGGSLRLSCAASGFTFSSYAMSWVRQAPGKGLEWVSAIIGSGASTYYADSVKGRFTISRDNSKNTLYLQMNSLRAEDTAVYYCAKGWFGGFNYWGQGTLVTVSSASTKGPSVFPLAPSSKSTSGGTAALGCLVKDYFPEPVTVSWNSGALTSGVHTFPAVLQSSGLYSLSSVVTVPSSSLGTQTYICNVNHKPSNTKVDKKVEPKSCDKTHTCPPCPAPEAAGGPSVFLFPPKPKDTLMISRTPEVTCVVVDVSHEDPEVKFNWYVDGVEVHNAKTKPREEQYNSTYRVVSVLTVLHQDWLNGKEYKCKVSNKALGAPIEKTISKAKGQPREPQVCTLPPSRDELTKNQVSLSCAVKGFYPSDIAVEWESNGQPENNYKTTPPVLDSDGSFFLVSKLTVDKSRWQQGNVFSCSVMHEALHNHYTQKSLSLSPGGGGGSGGGGSREGPELSPDDPAGLLDLRQGMFAQLVAQNVLLIDGPLSWYSDPGLAGVSLTGGLSYKEDTKELVVAKAGVYYVFFQLELRRVVAGEGSGSVSLALHLQPLRSAAGAAALALTVDLPPASSEARNSAFGFQGRLLHLSAGQRLGVHLHTEARARHAWQLTQGATVLGLFRVTPEIPAGLPSPRSEGGGGSGGGGSREGPELSPDDPAGLLDLRQGMFAQLVAQNVLLIDGPLSWYSDPGLAGVSLTGGLSYKEDTKELVVAKAGVYYVFFQLELRRVVAGEGSGSVSLALHLQPLRSAAGAAALALTVDLPPASSEARNSAFGFQGRLLHLSAGQRLGVHLHTEARARHAWQLTQGATVLGLFRVTPEIPAGLPSPRSE

SEQ ID NO: 213 - protein, 642 aa, Artificial Sequence
  Description of Artificial Sequence: Synthetic polypeptide
  DP47 (VH-CL) Fc knob monomeric 4-1BB (71-254) ligand
EVQLLESGGGLVQPGGSLRLSCAASGFTFSSYAMSWVRQAPGKGLEWVSAISGSGGSTYYADSVKGRFTISRDNSKNTLYLQMNSLRAEDTAVYYCAKGSGFDYWGQGTLVTVSSASVAAPSVFIFPPSDEQLKSGTASVVCLLNNFYPREAKVQWKVDNALQSGNSQESVTEQDSKDSTYSLSSTLTLSKADYEKHKVYACEVTHQGLSSPVTKSFNRGECDKTHTCPPCPAPEAAGGPSVFLFPPKPKDTLMISRTPEVTCVVVDVSHEDPEVKFNWYVDGVEVHNAKTKPREEQYNSTYRVVSVLTVLHQDWLNGKEYKCKVSNKALGAPIEKTISKAKGQPREPQVYTLPPCRDELTKNQVSLWCLVKGFYPSDIAVEWESNGQPENNYKTTPPVLDSDGSFFLYSKLTVDKSRWQQGNVFSCSVMHEALHNHYTQKSLSLSPGGGGGSGGGGSREGPELSPDDPAGLLDLRQGMFAQLVAQNVLLIDGPLSWYSDPGLAGVSLTGGLSYKEDTKELVVAKAGVYYVFFQLELRRVVAGEGSGSVSLALHLQPLRSAAGAAALALTVDLPPASSEARNSAFGFQGRLLHLSAGQRLGVHLHTEARARHAWQLTQGATVLGLFRVTPEIPAGLPSPRSE

SEQ ID NO: 214 - protein, 213 aa, Artificial Sequence
  Description of Artificial Sequence: Synthetic polypeptide
  DP47 (VL-CH1) light chain
EIVLTQSPGTLSLSPGERATLSCRASQSVSSSYLAWYQQKPGQAPRLLIYGASSRATGIPDRFSGSGSGTDFTLTISRLEPEDFAVYYCQQYGSSPLTFGQGTKVEIKSSASTKGPSVFPLAPSSKSTSGGTAALGCLVKDYFPEPVTVSWNSGALTSGVHTFPAVLQSSGLYSLSSVVTVPSSSLGTQTYICNVNHKPSNTKVDKKVEPKSC

SEQ ID NO: 215 - DNA, 1920 bp, Artificial Sequence
  Description of Artificial Sequence: Synthetic polynucleotide
  nucleotide sequence of anti-FAP(4B9) Fc hole monomeric 4-1BBL (71-254) chain
gaggtgcagctgctcgaaagcggcggaggactggtgcagcctggcggcagcctgagactgtcttgcgccgccagcggcttcaccttcagcagctacgccatgagctgggtccgccaggcccctggcaagggactggaatgggtgtccgccatcatcggctctggcgccagcacctactacgccgacagcgtgaagggccggttcaccatcagccgggacaacagcaagaacaccctgtacctgcagatgaacagcctgcgggccgaggacaccgccgtgtactactgcgccaagggatggttcggcggcttcaactactggggacagggcaccctggtcacagtgtccagcgctagcaccaagggcccctccgtgttccccctggcccccagcagcaagagcaccagcggcggcacagccgctctgggctgcctggtcaaggactacttccccgagcccgtgaccgtgtcctggaacagcggagccctgacctccggcgtgcacaccttccccgccgtgctgcagagttctggcctgtatagcctgagcagcgtggtcaccgtgccttctagcagcctgggcacccagacctacatctgcaacgtgaaccacaagcccagcaacaccaaggtggacaagaaggtggagcccaagagctgcgacaaaactcacacatgcccaccgtgcccagcacctgaagctgcagggggaccgtcagtcttcctcttccccccaaaacccaaggacaccctcatgatctcccggacccctgaggtcacatgcgtggtggtggacgtgagccacgaagaccctgaggtcaagttcaactggtacgtggacggcgtggaggtgcataatgccaagacaaagccgcgggaggagcagtacaacagcacgtaccgtgtggtcagcgtcctcaccgtcctgcaccaggactggctgaatggcaaggagtacaagtgcaaggtctccaacaaagccctcggcgcccccatcgagaaaaccatctccaaagccaaagggcagccccgagaaccacaggtgtgcaccctgcccccatcccgggatgagctgaccaagaaccaggtcagcctctcgtgcgcagtcaaaggcttctatcccagcgacatcgccgtggagtgggagagcaatgggcagccggagaacaactacaagaccacgcctcccgtgctggactccgacggctccttcttcctcgtgagcaagctcaccgtggacaagagcaggtggcagcaggggaacgtcttctcatgctccgtgatgcatgaggctctgcacaaccactacacgcagaagagcctctccctgtctccgggtggaggcggcggaagcggaggaggaggatccagagagggccctgagctgagccccgatgatcctgctggactgctggacctgcggcagggcatgtttgctcagctggtggcccagaacgtgctgctgatcgatggccccctgtcctggtacagcgatcctggactggctggcgtgtcactgacaggcggcctgagctacaaagaggacaccaaagaactggtggtggccaaggccggcgtgtactacgtgttctttcagctggaactgcggagagtggtggccggcgaaggatctggctctgtgtctctggccctgcatctgcagcctctgagaagcgctgctggcgctgcagctctggcactgacagtggatctgcctcctgccagctccgaggcccggaatagcgcatttgggtttcaaggcaggctgctgcacctgtctgccggccagaggctgggagtgcatctgcacacagaggccagggctagacacgcctggcagctgacacagggcgctacagtgctgggcctgttcagagtgacccccgagattccagccggcctgccttctccaagaagcgaa

SEQ ID NO: 216 - DNA, 2508 bp, Artificial Sequence
  Description of Artificial Sequence: Synthetic polynucleotide
  nucleotide sequence of DP47 (VH-CL) Fc knob dimeric 4-1BB ligand (71-254) chain
gaggtgcaattgttggagtctgggggaggcttggtacagcctggggggtccctgagactctcctgtgcagcctccggattcacctttagcagttatgccatgagctgggtccgccaggctccagggaaggggctggagtgggtctcagctattagtggtagtggtggtagcacatactacgcagactccgtgaagggccggttcaccatctccagagacaattccaagaacacgctgtatctgcagatgaacagcctgagagccgaggacacggccgtatattactgtgcgaaaggcagcggatttgactactggggccaaggaaccctggtcaccgtctcgagcgctagtgtggccgctccctccgtgtttatctttcccccatccgatgaacagctgaaaagcggcaccgcctccgtcgtgtgtctgctgaacaatttttaccctagggaagctaaagtgcagtggaaagtggataacgcactgcagtccggcaactcccaggaatctgtgacagaacaggactccaaggacagcacctactccctgtcctccaccctgacactgtctaaggctgattatgagaaacacaaagtctacgcctgcgaagtcacccatcagggcctgagctcgcccgtcacaaagagcttcaacaggggagagtgtgacaagacccacacctgtcccccttgtcctgcccctgaagctgctggcggcccttctgtgttcctgttccccccaaagcccaaggacaccctgatgatcagccggacccccgaagtgacctgcgtggtggtggatgtgtcccacgaggaccctgaagtgaagttcaattggtacgtggacggcgtggaagtgcacaacgccaagacaaagccgcgggaggagcagtacaacagcacgtaccgtgtggtcagcgtcctcaccgtcctgcaccaggactggctgaatggcaaggagtacaagtgcaaggtctccaacaaagccctcggcgcccccatcgagaaaaccatctccaaagccaaagggcagccccgagaaccacaggtgtacaccctgcccccctgcagagatgagctgaccaagaaccaggtgtccctgtggtgtctggtcaagggcttctaccccagcgatatcgccgtggagtgggagagcaacggccagcctgagaacaactacaagaccaccccccctgtgctggacagcgacggcagcttcttcctgtactccaaactgaccgtggacaagagccggtggcagcagggcaacgtgttcagctgcagcgtgatgcacgaggccctgcacaaccactacacccagaagtccctgagcctgagccccggcggaggcggcggaagcggaggaggaggatccagagagggccctgagctgagccccgatgatcctgctggactgctggacctgcggcagggcatgtttgctcagctggtggcccagaacgtgctgctgatcgatggccccctgtcctggtacagcgatcctggactggctggcgtgtcactgacaggcggcctgagctacaaagaggacaccaaagaactggtggtggccaaggccggcgtgtactacgtgttctttcagctggaactgcggagagtggtggccggcgaaggatctggctctgtgtctctggccctgcatctgcagcctctgagaagcgctgctggcgctgcagctctggcactgacagtggatctgcctcctgccagctccgaggcccggaatagcgcatttgggtttcaaggcaggctgctgcacctgtctgccggccagaggctgggagtgcatctgcacacagaggccagggctagacacgcctggcagctgacacagggcgctacagtgctgggcctgttcagagtgacccccgagattccagccggcctgccttctccaagaagcgaaggcggaggcggatctggcggcggaggatctagagagggacccgaactgtcccctgacgatccagccgggctgctggatctgagacagggaatgttcgcccagctggtggctcagaatgtgctgctgattgacggacctctgagctggtactccgacccagggctggcaggggtgtccctgactgggggactgtcctacaaagaagatacaaaagaactggtggtggctaaagctggggtgtactatgtgttttttcagctggaactgaggcgggtggtggctggggagggctcaggatctgtgtccctggctctgcatctgcagccactgcgctctgctgctggcgcagctgcactggctctgactgtggacctgccaccagcctctagcgaggccagaaacagcgccttcgggttccaaggacgcctgctgcatctgagcgccggacagcgcctgggagtgcatctgcatactgaagccagagcccggcatgcttggcagctgactcagggggcaactgtgctgggactgtttcgcgtgacacctgagatccctgccggactgccaagccctagatcagaa

SEQ ID NO: 217 - protein, 640 aa, Artificial Sequence
  Description of Artificial Sequence: Synthetic polypeptide
  anti-FAP(4B9) Fc hole monomeric 4-1BBL (71-254) chain
EVQLLESGGGLVQPGGSLRLSCAASGFTFSSYAMSWVRQAPGKGLEWVSAIIGSGASTYYADSVKGRFTISRDNSKNTLYLQMNSLRAEDTAVYYCAKGWFGGFNYWGQGTLVTVSSASTKGPSVFPLAPSSKSTSGGTAALGCLVKDYFPEPVTVSWNSGALTSGVHTFPAVLQSSGLYSLSSVVTVPSSSLGTQTYICNVNHKPSNTKVDKKVEPKSCDKTHTCPPCPAPEAAGGPSVFLFPPKPKDTLMISRTPEVTCVVVDVSHEDPEVKFNWYVDGVEVHNAKTKPREEQYNSTYRVVSVLTVLHQDWLNGKEYKCKVSNKALGAPIEKTISKAKGQPREPQVCTLPPSRDELTKNQVSLSCAVKGFYPSDIAVEWESNGQPENNYKTTPPVLDSDGSFFLVSKLTVDKSRWQQGNVFSCSVMHEALHNHYTQKSLSLSPGGGGGSGGGGSREGPELSPDDPAGLLDLRQGMFAQLVAQNVLLIDGPLSWYSDPGLAGVSLTGGLSYKEDTKELVVAKAGVYYVFFQLELRRVVAGEGSGSVSLALHLQPLRSAAGAAALALTVDLPPASSEARNSAFGFQGRLLHLSAGQRLGVHLHTEARARHAWQLTQGATVLGLFRVTPEIPAGLPSPRSE

SEQ ID NO: 218 - protein, 836 aa, Artificial Sequence
  Description of Artificial Sequence: Synthetic polypeptide
  DP47 (VH-CL) Fc knob dimeric 4-1BB ligand (71-254) chain
EVQLLESGGGLVQPGGSLRLSCAASGFTFSSYAMSWVRQAPGKGLEWVSAISGSGGSTYYADSVKGRFTISRDNSKNTLYLQMNSLRAEDTAVYYCAKGSGFDYWGQGTLVTVSSASVAAPSVFIFPPSDEQLKSGTASVVCLLNNFYPREAKVQWKVDNALQSGNSQESVTEQDSKDSTYSLSSTLTLSKADYEKHKVYACEVTHQGLSSPVTKSFNRGECDKTHTCPPCPAPEAAGGPSVFLFPPKPKDTLMISRTPEVTCVVVDVSHEDPEVKFNWYVDGVEVHNAKTKPREEQYNSTYRVVSVLTVLHQDWLNGKEYKCKVSNKALGAPIEKTISKAKGQPREPQVYTLPPCRDELTKNQVSLWCLVKGFYPSDIAVEWESNGQPENNYKTTPPVLDSDGSFFLYSKLTVDKSRWQQGNVFSCSVMHEALHNHYTQKSLSLSPGGGGGSGGGGSREGPELSPDDPAGLLDLRQGMFAQLVAQNVLLIDGPLSWYSDPGLAGVSLTGGLSYKEDTKELVVAKAGVYYVFFQLELRRVVAGEGSGSVSLALHLQPLRSAAGAAALALTVDLPPASSEARNSAFGFQGRLLHLSAGQRLGVHLHTEARARHAWQLTQGATVLGLFRVTPEIPAGLPSPRSEGGGGSGGGGSREGPELSPDDPAGLLDLRQGMFAQLVAQNVLLIDGPLSWYSDPGLAGVSLTGGLSYKEDTKELVVAKAGVYYVFFQLELRRVVAGEGSGSVSLALHLQPLRSAAGAAALALTVDLPPASSEARNSAFGFQGRLLHLSAGQRLGVHLHTEARARHAWQLTQGATVLGLFRVTPEIPAGLPSPRSE

SEQ ID NO: 219 - DNA, 2508 bp, Artificial Sequence
  Description of Artificial Sequence: Synthetic polynucleotide
  nucleotide sequence of DP47(VH-CL) Fc hole dimeric 4-1BB ligand (71-254) chain
gaggtgcaattgttggagtctgggggaggcttggtacagcctggggggtccctgagactctcctgtgcagcctccggattcacctttagcagttatgccatgagctgggtccgccaggctccagggaaggggctggagtgggtctcagctattagtggtagtggtggtagcacatactacgcagactccgtgaagggccggttcaccatctccagagacaattccaagaacacgctgtatctgcagatgaacagcctgagagccgaggacacggccgtatattactgtgcgaaaggcagcggatttgactactggggccaaggaaccctggtcaccgtctcgagcgctagtgtggccgctccctccgtgtttatctttcccccatccgatgaacagctgaaaagcggcaccgcctccgtcgtgtgtctgctgaacaatttttaccctagggaagctaaagtgcagtggaaagtggataacgcactgcagtccggcaactcccaggaatctgtgacagaacaggactccaaggacagcacctactccctgtcctccaccctgacactgtctaaggctgattatgagaaacacaaagtctacgcctgcgaagtcacccatcagggcctgagctcgcccgtcacaaagagcttcaacaggggagagtgtgacaaaactcacacatgcccaccgtgcccagcacctgaagctgcagggggaccgtcagtcttcctcttccccccaaaacccaaggacaccctcatgatctcccggacccctgaggtcacatgcgtggtggtggacgtgagccacgaagaccctgaggtcaagttcaactggtacgtggacggcgtggaggtgcataatgccaagacaaagccgcgggaggagcagtacaacagcacgtaccgtgtggtcagcgtcctcaccgtcctgcaccaggactggctgaatggcaaggagtacaagtgcaaggtctccaacaaagccctcggcgcccccatcgagaaaaccatctccaaagccaaagggcagccccgagaaccacaggtgtgcaccctgcccccatcccgggatgagctgaccaagaaccaggtcagcctctcgtgcgcagtcaaaggcttctatcccagcgacatcgccgtggagtgggagagcaatgggcagccggagaacaactacaagaccacgcctcccgtgctggactccgacggctccttcttcctcgtgagcaagctcaccgtggacaagagcaggtggcagcaggggaacgtcttctcatgctccgtgatgcatgaggctctgcacaaccactacacgcagaagagcctctccctgtctccgggtggaggcggcggaagcggaggaggaggatccagagagggccctgagctgagccccgatgatcctgctggactgctggacctgcggcagggcatgtttgctcagctggtggcccagaacgtgctgctgatcgatggccccctgtcctggtacagcgatcctggactggctggcgtgtcactgacaggcggcctgagctacaaagaggacaccaaagaactggtggtggccaaggccggcgtgtactacgtgttctttcagctggaactgcggagagtggtggccggcgaaggatctggctctgtgtctctggccctgcatctgcagcctctgagaagcgctgctggcgctgcagctctggcactgacagtggatctgcctcctgccagctccgaggcccggaatagcgcatttgggtttcaaggcaggctgctgcacctgtctgccggccagaggctgggagtgcatctgcacacagaggccagggctagacacgcctggcagctgacacagggcgctacagtgctgggcctgttcagagtgacccccgagattccagccggcctgccttctccaagaagcgaaggcggaggcggatctggcggcggaggatctagagagggacccgaactgtcccctgacgatccagccgggctgctggatctgagacagggaatgttcgcccagctggtggctcagaatgtgctgctgattgacggacctctgagctggtactccgacccagggctggcaggggtgtccctgactgggggactgtcctacaaagaagatacaaaagaactggtggtggctaaagctggggtgtactatgtgttttttcagctggaactgaggcgggtggtggctggggagggctcaggatctgtgtccctggctctgcatctgcagccactgcgctctgctgctggcgcagctgcactggctctgactgtggacctgccaccagcctctagcgaggccagaaacagcgccttcgggttccaaggacgcctgctgcatctgagcgccggacagcgcctgggagtgcatctgcatactgaagccagagcccggcatgcttggcagctgactcagggggcaactgtgctgggactgtttcgcgtgacacctgagatccctgccggactgccaagccctagatcagaa

SEQ ID NO: 220 - DNA, 1920 bp, Artificial Sequence
  Description of Artificial Sequence: Synthetic polynucleotide
  nucleotide sequence of FAP (4B9) Fc knob monomeric 4-1BB (71-254) ligand
gaggtgcagctgctcgaaagcggcggaggactggtgcagcctggcggcagcctgagactgtcttgcgccgccagcggcttcaccttcagcagctacgccatgagctgggtccgccaggcccctggcaagggactggaatgggtgtccgccatcatcggctctggcgccagcacctactacgccgacagcgtgaagggccggttcaccatcagccgggacaacagcaagaacaccctgtacctgcagatgaacagcctgcgggccgaggacaccgccgtgtactactgcgccaagggatggttcggcggcttcaactactggggacagggcaccctggtcacagtgtccagcgctagcaccaagggcccctccgtgttccccctggcccccagcagcaagagcaccagcggcggcacagccgctctgggctgcctggtcaaggactacttccccgagcccgtgaccgtgtcctggaacagcggagccctgacctccggcgtgcacaccttccccgccgtgctgcagagttctggcctgtatagcctgagcagcgtggtcaccgtgccttctagcagcctgggcacccagacctacatctgcaacgtgaaccacaagcccagcaacaccaaggtggacaagaaggtggagcccaagagctgcgacaagacccacacctgtcccccttgtcctgcccctgaagctgctggcggcccttctgtgttcctgttccccccaaagcccaaggacaccctgatgatcagccggacccccgaagtgacctgcgtggtggtggatgtgtcccacgaggaccctgaagtgaagttcaattggtacgtggacggcgtggaagtgcacaacgccaagacaaagccgcgggaggagcagtacaacagcacgtaccgtgtggtcagcgtcctcaccgtcctgcaccaggactggctgaatggcaaggagtacaagtgcaaggtctccaacaaagccctcggcgcccccatcgagaaaaccatctccaaagccaaagggcagccccgagaaccacaggtgtacaccctgcccccctgcagagatgagctgaccaagaaccaggtgtccctgtggtgtctggtcaagggcttctaccccagcgatatcgccgtggagtgggagagcaacggccagcctgagaacaactacaagaccaccccccctgtgctggacagcgacggcagcttcttcctgtactccaaactgaccgtggacaagagccggtggcagcagggcaacgtgttcagctgcagcgtgatgcacgaggccctgcacaaccactacacccagaagtccctgagcctgagccccggcggaggcggcggaagcggaggaggaggatccagagagggccctgagctgagccccgatgatcctgctggactgctggacctgcggcagggcatgtttgctcagctggtggcccagaacgtgctgctgatcgatggccccctgtcctggtacagcgatcctggactggctggcgtgtcactgacaggcggcctgagctacaaagaggacaccaaagaactggtggtggccaaggccggcgtgtactacgtgttctttcagctggaactgcggagagtggtggccggcgaaggatctggctctgtgtctctggccctgcatctgcagcctctgagaagcgctgctggcgctgcagctctggcactgacagtggatctgcctcctgccagctccgaggcccggaatagcgcatttgggtttcaaggcaggctgctgcacctgtctgccggccagaggctgggagtgcatctgcacacagaggccagggctagacacgcctggcagctgacacagggcgctacagtgctgggcctgttcagagtgacccccgagattccagccggcctgccttctccaagaagcgaa

SEQ ID NO: 221 - protein, 836 aa, Artificial Sequence
  Description of Artificial Sequence: Synthetic polypeptide
  DP47(VH-CL) Fc hole dimeric 4-1BB ligand (71-254) chain
EVQLLESGGGLVQPGGSLRLSCAASGFTFSSYAMSWVRQAPGKGLEWVSAISGSGGSTYYADSVKGRFTISRDNSKNTLYLQMNSLRAEDTAVYYCAKGSGFDYWGQGTLVTVSSASVAAPSVFIFPPSDEQLKSGTASVVCLLNNFYPREAKVQWKVDNALQSGNSQESVTEQDSKDSTYSLSSTLTLSKADYEKHKVYACEVTHQGLSSPVTKSFNRGECDKTHTCPPCPAPEAAGGPSVFLFPPKPKDTLMISRTPEVTCVVVDVSHEDPEVKFNWYVDGVEVHNAKTKPREEQYNSTYRVVSVLTVLHQDWLNGKEYKCKVSNKALGAPIEKTISKAKGQPREPQVCTLPPSRDELTKNQVSLSCAVKGFYPSDIAVEWESNGQPENNYKTTPPVLDSDGSFFLVSKLTVDKSRWQQGNVFSCSVMHEALHNHYTQKSLSLSPGGGGGSGGGGSREGPELSPDDPAGLLDLRQGMFAQLVAQNVLLIDGPLSWYSDPGLAGVSLTGGLSYKEDTKELVVAKAGVYYVFFQLELRRVVAGEGSGSVSLALHLQPLRSAAGAAALALTVDLPPASSEARNSAFGFQGRLLHLSAGQRLGVHLHTEARARHAWQLTQGATVLGLFRVTPEIPAGLPSPRSEGGGGSGGGGSREGPELSPDDPAGLLDLRQGMFAQLVAQNVLLIDGPLSWYSDPGLAGVSLTGGLSYKEDTKELVVAKAGVYYVFFQLELRRVVAGEGSGSVSLALHLQPLRSAAGAAALALTVDLPPASSEARNSAFGFQGRLLHLSAGQRLGVHLHTEARARHAWQLTQGATVLGLFRVTPEIPAGLPSPRSE

SEQ ID NO: 222 - protein, 640 aa, Artificial Sequence
  Description of Artificial Sequence: Synthetic polypeptide
  FAP (4B9) Fc knob monomeric 4-1BB (71-254) ligand
EVQLLESGGGLVQPGGSLRLSCAASGFTFSSYAMSWVRQAPGKGLEWVSAIIGSGASTYYADSVKGRFTISRDNSKNTLYLQMNSLRAEDTAVYYCAKGWFGGFNYWGQGTLVTVSSASTKGPSVFPLAPSSKSTSGGTAALGCLVKDYFPEPVTVSWNSGALTSGVHTFPAVLQSSGLYSLSSVVTVPSSSLGTQTYICNVNHKPSNTKVDKKVEPKSCDKTHTCPPCPAPEAAGGPSVFLFPPKPKDTLMISRTPEVTCVVVDVSHEDPEVKFNWYVDGVEVHNAKTKPREEQYNSTYRVVSVLTVLHQDWLNGKEYKCKVSNKALGAPIEKTISKAKGQPREPQVYTLPPCRDELTKNQVSLWCLVKGFYPSDIAVEWESNGQPENNYKTTPPVLDSDGSFFLYSKLTVDKSRWQQGNVFSCSVMHEALHNHYTQKSLSLSPGGGGGSGGGGSREGPELSPDDPAGLLDLRQGMFAQLVAQNVLLIDGPLSWYSDPGLAGVSLTGGLSYKEDTKELVVAKAGVYYVFFQLELRRVVAGEGSGSVSLALHLQPLRSAAGAAALALTVDLPPASSEARNSAFGFQGRLLHLSAGQRLGVHLHTEARARHAWQLTQGATVLGLFRVTPEIPAGLPSPRSE

SEQ ID NO: 223 - DNA, 1926 bp, Artificial Sequence
  Description of Artificial Sequence: Synthetic polynucleotide
  nucleotide sequence of DP47 (VH-CL) Fc hole monomeric 4-1BBL (71-254) chain
gaggtgcaattgttggagtctgggggaggcttggtacagcctggggggtccctgagactctcctgtgcagcctccggattcacctttagcagttatgccatgagctgggtccgccaggctccagggaaggggctggagtgggtctcagctattagtggtagtggtggtagcacatactacgcagactccgtgaagggccggttcaccatctccagagacaattccaagaacacgctgtatctgcagatgaacagcctgagagccgaggacacggccgtatattactgtgcgaaaggcagcggatttgactactggggccaaggaaccctggtcaccgtctcgagcgctagtgtggccgctccctccgtgtttatctttcccccatccgatgaacagctgaaaagcggcaccgcctccgtcgtgtgtctgctgaacaatttttaccctagggaagctaaagtgcagtggaaagtggataacgcactgcagtccggcaactcccaggaatctgtgacagaacaggactccaaggacagcacctactccctgtcctccaccctgacactgtctaaggctgattatgagaaacacaaagtctacgcctgcgaagtcacccatcagggcctgagctcgcccgtcacaaagagcttcaacaggggagagtgtgacaaaactcacacatgcccaccgtgcccagcacctgaagctgcagggggaccgtcagtcttcctcttccccccaaaacccaaggacaccctcatgatctcccggacccctgaggtcacatgcgtggtggtggacgtgagccacgaagaccctgaggtcaagttcaactggtacgtggacggcgtggaggtgcataatgccaagacaaagccgcgggaggagcagtacaacagcacgtaccgtgtggtcagcgtcctcaccgtcctgcaccaggactggctgaatggcaaggagtacaagtgcaaggtctccaacaaagccctcggcgcccccatcgagaaaaccatctccaaagccaaagggcagccccgagaaccacaggtgtgcaccctgcccccatcccgggatgagctgaccaagaaccaggtcagcctctcgtgcgcagtcaaaggcttctatcccagcgacatcgccgtggagtgggagagcaatgggcagccggagaacaactacaagaccacgcctcccgtgctggactccgacggctccttcttcctcgtgagcaagctcaccgtggacaagagcaggtggcagcaggggaacgtcttctcatgctccgtgatgcatgaggctctgcacaaccactacacgcagaagagcctctccctgtctccgggtggaggcggcggaagcggaggaggaggatccagagagggccctgagctgagccccgatgatcctgctggactgctggacctgcggcagggcatgtttgctcagctggtggcccagaacgtgctgctgatcgatggccccctgtcctggtacagcgatcctggactggctggcgtgtcactgacaggcggcctgagctacaaagaggacaccaaagaactggtggtggccaaggccggcgtgtactacgtgttctttcagctggaactgcggagagtggtggccggcgaaggatctggctctgtgtctctggccctgcatctgcagcctctgagaagcgctgctggcgctgcagctctggcactgacagtggatctgcctcctgccagctccgaggcccggaatagcgcatttgggtttcaaggcaggctgctgcacctgtctgccggccagaggctgggagtgcatctgcacacagaggccagggctagacacgcctggcagctgacacagggcgctacagtgctgggcctgttcagagtgacccccgagattccagccggcctgccttctccaagaagcgaa

SEQ ID NO: 224 - DNA, 2502 bp, Artificial Sequence
  Description of Artificial Sequence: Synthetic polynucleotide
  nucleotide sequence of FAP (4B9) Fc knob dimeric 4-1BB ligand (71-254) chain
gaggtgcagctgctcgaaagcggcggaggactggtgcagcctggcggcagcctgagactgtcttgcgccgccagcggcttcaccttcagcagctacgccatgagctgggtccgccaggcccctggcaagggactggaatgggtgtccgccatcatcggctctggcgccagcacctactacgccgacagcgtgaagggccggttcaccatcagccgggacaacagcaagaacaccctgtacctgcagatgaacagcctgcgggccgaggacaccgccgtgtactactgcgccaagggatggttcggcggcttcaactactggggacagggcaccctggtcacagtgtccagcgctagcaccaagggcccctccgtgttccccctggcccccagcagcaagagcaccagcggcggcacagccgctctgggctgcctggtcaaggactacttccccgagcccgtgaccgtgtcctggaacagcggagccctgacctccggcgtgcacaccttccccgccgtgctgcagagttctggcctgtatagcctgagcagcgtggtcaccgtgccttctagcagcctgggcacccagacctacatctgcaacgtgaaccacaagcccagcaacaccaaggtggacaagaaggtggagcccaagagctgcgacaagacccacacctgtcccccttgtcctgcccctgaagctgctggcggcccttctgtgttcctgttccccccaaagcccaaggacaccctgatgatcagccggacccccgaagtgacctgcgtggtggtggatgtgtcccacgaggaccctgaagtgaagttcaattggtacgtggacggcgtggaagtgcacaacgccaagacaaagccgcgggaggagcagtacaacagcacgtaccgtgtggtcagcgtcctcaccgtcctgcaccaggactggctgaatggcaaggagtacaagtgcaaggtctccaacaaagccctcggcgcccccatcgagaaaaccatctccaaagccaaagggcagccccgagaaccacaggtgtacaccctgcccccctgcagagatgagctgaccaagaaccaggtgtccctgtggtgtctggtcaagggcttctaccccagcgatatcgccgtggagtgggagagcaacggccagcctgagaacaactacaagaccaccccccctgtgctggacagcgacggcagcttcttcctgtactccaaactgaccgtggacaagagccggtggcagcagggcaacgtgttcagctgcagcgtgatgcacgaggccctgcacaaccactacacccagaagtccctgagcctgagccccggcggaggcggcggaagcggaggaggaggatccagagagggccctgagctgagccccgatgatcctgctggactgctggacctgcggcagggcatgtttgctcagctggtggcccagaacgtgctgctgatcgatggccccctgtcctggtacagcgatcctggactggctggcgtgtcactgacaggcggcctgagctacaaagaggacaccaaagaactggtggtggccaaggccggcgtgtactacgtgttctttcagctggaactgcggagagtggtggccggcgaaggatctggctctgtgtctctggccctgcatctgcagcctctgagaagcgctgctggcgctgcagctctggcactgacagtggatctgcctcctgccagctccgaggcccggaatagcgcatttgggtttcaaggcaggctgctgcacctgtctgccggccagaggctgggagtgcatctgcacacagaggccagggctagacacgcctggcagctgacacagggcgctacagtgctgggcctgttcagagtgacccccgagattccagccggcctgccttctccaagaagcgaaggcggaggcggatctggcggcggaggatctagagagggacccgaactgtcccctgacgatccagccgggctgctggatctgagacagggaatgttcgcccagctggtggctcagaatgtgctgctgattgacggacctctgagctggtactccgacccagggctggcaggggtgtccctgactgggggactgtcctacaaagaagatacaaaagaactggtggtggctaaagctggggtgtactatgtgttttttcagctggaactgaggcgggtggtggctggggagggctcaggatctgtgtccctggctctgcatctgcagccactgcgctctgctgctggcgcagctgcactggctctgactgtggacctgccaccagcctctagcgaggccagaaacagcgccttcgggttccaaggacgcctgctgcatctgagcgccggacagcgcctgggagtgcatctgcatactgaagccagagcccggcatgcttggcagctgactcagggggcaactgtgctgggactgtttcgcgtgacacctgagatccctgccggactgccaagccctagatcagaa

SEQ ID NO: 225 - protein, 642 aa, Artificial Sequence
  Description of Artificial Sequence: Synthetic polypeptide
  DP47 (VH-CL) Fc hole monomeric 4-1BBL (71-254) chain
EVQLLESGGGLVQPGGSLRLSCAASGFTFSSYAMSWVRQAPGKGLEWVSAISGSGGSTYYADSVKGRFTISRDNSKNTLYLQMNSLRAEDTAVYYCAKGSGFDYWGQGTLVTVSSASVAAPSVFIFPPSDEQLKSGTASVVCLLNNFYPREAKVQWKVDNALQSGNSQESVTEQDSKDSTYSLSSTLTLSKADYEKHKVYACEVTHQGLSSPVTKSFNRGECDKTHTCPPCPAPEAAGGPSVFLFPPKPKDTLMISRTPEVTCVVVDVSHEDPEVKFNWYVDGVEVHNAKTKPREEQYNSTYRVVSVLTVLHQDWLNGKEYKCKVSNKALGAPIEKTISKAKGQPREPQVCTLPPSRDELTKNQVSLSCAVKGFYPSDIAVEWESNGQPENNYKTTPPVLDSDGSFFLVSKLTVDKSRWQQGNVFSCSVMHEALHNHYTQKSLSLSPGGGGGSGGGGSREGPELSPDDPAGLLDLRQGMFAQLVAQNVLLIDGPLSWYSDPGLAGVSLTGGLSYKEDTKELVVAKAGVYYVFFQLELRRVVAGEGSGSVSLALHLQPLRSAAGAAALALTVDLPPASSEARNSAFGFQGRLLHLSAGQRLGVHLHTEARARHAWQLTQGATVLGLFRVTPEIPAGLPSPRSE

SEQ ID NO: 226 - protein, 834 aa, Artificial Sequence
  Description of Artificial Sequence: Synthetic polypeptide
  anti-FAP(4B9) Fc knob dimeric 4-1BB ligand (71-254) chain
EVQLLESGGGLVQPGGSLRLSCAASGFTFSSYAMSWVRQAPGKGLEWVSAIIGSGASTYYADSVKGRFTISRDNSKNTLYLQMNSLRAEDTAVYYCAKGWFGGFNYWGQGTLVTVSSASTKGPSVFPLAPSSKSTSGGTAALGCLVKDYFPEPVTVSWNSGALTSGVHTFPAVLQSSGLYSLSSVVTVPSSSLGTQTYICNVNHKPSNTKVDKKVEPKSCDKTHTCPPCPAPEAAGGPSVFLFPPKPKDTLMISRTPEVTCVVVDVSHEDPEVKFNWYVDGVEVHNAKTKPREEQYNSTYRVVSVLTVLHQDWLNGKEYKCKVSNKALGAPIEKTISKAKGQPREPQVYTLPPCRDELTKNQVSLWCLVKGFYPSDIAVEWESNGQPENNYKTTPPVLDSDGSFFLYSKLTVDKSRWQQGNVFSCSVMHEALHNHYTQKSLSLSPGGGGGSGGGGSREGPELSPDDPAGLLDLRQGMFAQLVAQNVLLIDGPLSWYSDPGLAGVSLTGGLSYKEDTKELVVAKAGVYYVFFQLELRRVVAGEGSGSVSLALHLQPLRSAAGAAALALTVDLPPASSEARNSAFGFQGRLLHLSAGQRLGVHLHTEARARHAWQLTQGATVLGLFRVTPEIPAGLPSPRSEGGGGSGGGGSREGPELSPDDPAGLLDLRQGMFAQLVAQNVLLIDGPLSWYSDPGLAGVSLTGGLSYKEDTKELVVAKAGVYYVFFQLELRRVVAGEGSGSVSLALHLQPLRSAAGAAALALTVDLPPASSEARNSAFGFQGRLLHLSAGQRLGVHLHTEARARHAWQLTQGATVLGLFRVTPEIPAGLPSPRSE

SEQ ID NO: 227 - DNA, 1908 bp, Artificial Sequence
  Description of Artificial Sequence: Synthetic polynucleotide
  nucleotide sequence of DP47 (VHCL) Fc knob monomeric 4-1BB (71-248) ligand
gaggtgcaattgttggagtctgggggaggcttggtacagcctggggggtccctgagactctcctgtgcagcctccggattcacctttagcagttatgccatgagctgggtccgccaggctccagggaaggggctggagtgggtctcagctattagtggtagtggtggtagcacatactacgcagactccgtgaagggccggttcaccatctccagagacaattccaagaacacgctgtatctgcagatgaacagcctgagagccgaggacacggccgtatattactgtgcgaaaggcagcggatttgactactggggccaaggaaccctggtcaccgtctcgagcgctagtgtggccgctccctccgtgtttatctttcccccatccgatgaacagctgaaaagcggcaccgcctccgtcgtgtgtctgctgaacaatttttaccctagggaagctaaagtgcagtggaaagtggataacgcactgcagtccggcaactcccaggaatctgtgacagaacaggactccaaggacagcacctactccctgtcctccaccctgacactgtctaaggctgattatgagaaacacaaagtctacgcctgcgaagtcacccatcagggcctgagctcgcccgtcacaaagagcttcaacaggggagagtgtgacaagacccacacctgtcccccttgtcctgcccctgaagctgctggcggcccttctgtgttcctgttccccccaaagcccaaggacaccctgatgatcagccggacccccgaagtgacctgcgtggtggtggatgtgtcccacgaggaccctgaagtgaagttcaattggtacgtggacggcgtggaagtgcacaacgccaagacaaagccgcgggaggagcagtacaacagcacgtaccgtgtggtcagcgtcctcaccgtcctgcaccaggactggctgaatggcaaggagtacaagtgcaaggtctccaacaaagccctcggcgcccccatcgagaaaaccatctccaaagccaaagggcagccccgagaaccacaggtgtacaccctgcccccctgcagagatgagctgaccaagaaccaggtgtccctgtggtgtctggtcaagggcttctaccccagcgatatcgccgtggagtgggagagcaacggccagcctgagaacaactacaagaccaccccccctgtgctggacagcgacggcagcttcttcctgtactccaaactgaccgtggacaagagccggtggcagcagggcaacgtgttcagctgcagcgtgatgcacgaggccctgcacaaccactacacccagaagtccctgagcctgagccccggcggaggcggcggaagcggaggaggaggatccagagagggccctgagctgagccctgatgatcctgccggactgctggacctgcggcagggaatgtttgcccagctggtggcccagaacgtgctgctgatcgatggccccctgtcctggtacagcgatcctggactggctggcgtgtcactgacaggcggcctgagctacaaagaggacaccaaagaactggtggtggccaaggccggcgtgtactacgtgttctttcagctggaactgcggagagtggtggccggcgaaggatctggctctgtgtctctggccctgcatctgcagcctctgagatctgctgctggcgccgctgctctggcactgacagtggatctgcctcctgccagcagcgaggcccggaatagcgcatttgggtttcaaggcaggctgctgcacctgtctgccggccagaggctgggagtgcatctgcacacagaggccagggctagacacgcctggcagctgacacagggcgctacagtgctgggcctgttcagagtgacccccgagattcctgccgggctc

SEQ ID NO: 228 - protein, 636 aa, Artificial Sequence
  Description of Artificial Sequence: Synthetic polypeptide
  DP47 (VH-CL) Fc knob monomeric 4-1BB (71-248) ligand
EVQLLESGGGLVQPGGSLRLSCAASGFTFSSYAMSWVRQAPGKGLEWVSAISGSGGSTYYADSVKGRFTISRDNSKNTLYLQMNSLRAEDTAVYYCAKGSGFDYWGQGTLVTVSSASVAAPSVFIFPPSDEQLKSGTASVVCLLNNFYPREAKVQWKVDNALQSGNSQESVTEQDSKDSTYSLSSTLTLSKADYEKHKVYACEVTHQGLSSPVTKSFNRGECDKTHTCPPCPAPEAAGGPSVFLFPPKPKDTLMISRTPEVTCVVVDVSHEDPEVKFNWYVDGVEVHNAKTKPREEQYNSTYRVVSVLTVLHQDWLNGKEYKCKVSNKALGAPIEKTISKAKGQPREPQVYTLPPCRDELTKNQVSLWCLVKGFYPSDIAVEWESNGQPENNYKTTPPVLDSDGSFFLYSKLTVDKSRWQQGNVFSCSVMHEALHNHYTQKSLSLSPGGGGGSGGGGSREGPELSPDDPAGLLDLRQGMFAQLVAQNVLLIDGPLSWYSDPGLAGVSLTGGLSYKEDTKELVVAKAGVYYVFFQLELRRVVAGEGSGSVSLALHLQPLRSAAGAAALALTVDLPPASSEARNSAFGFQGRLLHLSAGQRLGVHLHTEARARHAWQLTQGATVLGLFRVTPEIPAGL

SEQ ID NO: 229 - DNA, 2472 bp, Artificial Sequence
  Description of Artificial Sequence: Synthetic polynucleotide
  nucleotide sequence of DP47 (VH-CL) Fc knob dimeric 4-1BB ligand (71-248) chain
gaggtgcaattgttggagtctgggggaggcttggtacagcctggggggtccctgagactctcctgtgcagcctccggattcacctttagcagttatgccatgagctgggtccgccaggctccagggaaggggctggagtgggtctcagctattagtggtagtggtggtagcacatactacgcagactccgtgaagggccggttcaccatctccagagacaattccaagaacacgctgtatctgcagatgaacagcctgagagccgaggacacggccgtatattactgtgcgaaaggcagcggatttgactactggggccaaggaaccctggtcaccgtctcgagcgctagtgtggccgctccctccgtgtttatctttcccccatccgatgaacagctgaaaagcggcaccgcctccgtcgtgtgtctgctgaacaatttttaccctagggaagctaaagtgcagtggaaagtggataacgcactgcagtccggcaactcccaggaatctgtgacagaacaggactccaaggacagcacctactccctgtcctccaccctgacactgtctaaggctgattatgagaaacacaaagtctacgcctgcgaagtcacccatcagggcctgagctcgcccgtcacaaagagcttcaacaggggagagtgtgacaagacccacacctgtcccccttgtcctgcccctgaagctgctggcggcccttctgtgttcctgttccccccaaagcccaaggacaccctgatgatcagccggacccccgaagtgacctgcgtggtggtggatgtgtcccacgaggaccctgaagtgaagttcaattggtacgtggacggcgtggaagtgcacaacgccaagacaaagccgcgggaggagcagtacaacagcacgtaccgtgtggtcagcgtcctcaccgtcctgcaccaggactggctgaatggcaaggagtacaagtgcaaggtctccaacaaagccctcggcgcccccatcgagaaaaccatctccaaagccaaagggcagccccgagaaccacaggtgtacaccctgcccccctgcagagatgagctgaccaagaaccaggtgtccctgtggtgtctggtcaagggcttctaccccagcgatatcgccgtggagtgggagagcaacggccagcctgagaacaactacaagaccaccccccctgtgctggacagcgacggcagcttcttcctgtactccaaactgaccgtggacaagagccggtggcagcagggcaacgtgttcagctgcagcgtgatgcacgaggccctgcacaaccactacacccagaagtccctgagcctgagccccggcggaggcggcggaagcggaggaggaggatccagagagggccctgagctgagccctgatgatcctgccggactgctggacctgcggcagggaatgtttgcccagctggtggcccagaacgtgctgctgatcgatggccccctgtcctggtacagcgatcctggactggctggcgtgtcactgacaggcggcctgagctacaaagaggacaccaaagaactggtggtggccaaggccggcgtgtactacgtgttctttcagctggaactgcggagagtggtggccggcgaaggatctggctctgtgtctctggccctgcatctgcagcctctgagatctgctgctggcgccgctgctctggcactgacagtggatctgcctcctgccagcagcgaggcccggaatagcgcatttgggtttcaaggcaggctgctgcacctgtctgccggccagaggctgggagtgcatctgcacacagaggccagggctagacacgcctggcagctgacacagggcgctacagtgctgggcctgttcagagtgacccccgagattccagcaggcctgggaggcggcggatctggcggcggaggatctagagaaggacccgagctgtcccccgacgatcccgctgggctgctggatctgagacagggcatgttcgctcagctggtggctcagaatgtgctgctgattgacggacctctgagctggtactccgacccagggctggcaggggtgtccctgactgggggactgtcctacaaagaagatacaaaagaactggtggtggctaaagctggggtgtactatgtgttttttcagctggaactgaggcgggtggtggctggggagggctcaggatctgtgtccctggctctgcatctgcagccactgcgctctgcagcaggggctgcagcactggccctgactgtggacctgcccccagcttcttccgaggccagaaacagcgccttcgggttccaaggacgcctgctgcatctgagcgccggacagcgcctgggagtgcatctgcatactgaagccagagcccggcatgcttggcagctgactcagggggcaactgtgctgggactgtttcgcgtgacacctgagatcccagccgggctc

SEQ ID NO: 230 - protein, 824 aa, Artificial Sequence
  Description of Artificial Sequence: Synthetic polypeptide
  DP47 (VH-CL) Fc knob dimeric 4-1BB ligand (71-248) chain
EVQLLESGGGLVQPGGSLRLSCAASGFTFSSYAMSWVRQAPGKGLEWVSAISGSGGSTYYADSVKGRFTISRDNSKNTLYLQMNSLRAEDTAVYYCAKGSGFDYWGQGTLVTVSSASVAAPSVFIFPPSDEQLKSGTASVVCLLNNFYPREAKVQWKVDNALQSGNSQESVTEQDSKDSTYSLSSTLTLSKADYEKHKVYACEVTHQGLSSPVTKSFNRGECDKTHTCPPCPAPEAAGGPSVFLFPPKPKDTLMISRTPEVTCVVVDVSHEDPEVKFNWYVDGVEVHNAKTKPREEQYNSTYRVVSVLTVLHQDWLNGKEYKCKVSNKALGAPIEKTISKAKGQPREPQVYTLPPCRDELTKNQVSLWCLVKGFYPSDIAVEWESNGQPENNYKTTPPVLDSDGSFFLYSKLTVDKSRWQQGNVFSCSVMHEALHNHYTQKSLSLSPGGGGGSGGGGSREGPELSPDDPAGLLDLRQGMFAQLVAQNVLLIDGPLSWYSDPGLAGVSLTGGLSYKEDTKELVVAKAGVYYVFFQLELRRVVAGEGSGSVSLALHLQPLRSAAGAAALALTVDLPPASSEARNSAFGFQGRLLHLSAGQRLGVHLHTEARARHAWQLTQGATVLGLFRVTPEIPAGLGGGGSGGGGSREGPELSPDDPAGLLDLRQGMFAQLVAQNVLLIDGPLSWYSDPGLAGVSLTGGLSYKEDTKELVVAKAGVYYVFFQLELRRVVAGEGSGSVSLALHLQPLRSAAGAAALALTVDLPPASSEARNSAFGFQGRLLHLSAGQRLGVHLHTEARARHAWQLTQGATVLGLFRVTPEIPAGL

SEQ ID NO: 231 - DNA, 1908 bp, Artificial Sequence
  Description of Artificial Sequence: Synthetic polynucleotide
  nucleotide sequence of DP47(VH-CL) Fc hole dimeric 4-1BB ligand (71-248) chain
gaggtgcaattgttggagtctgggggaggcttggtacagcctggggggtccctgagactctcctgtgcagcctccggattcacctttagcagttatgccatgagctgggtccgccaggctccagggaaggggctggagtgggtctcagctattagtggtagtggtggtagcacatactacgcagactccgtgaagggccggttcaccatctccagagacaattccaagaacacgctgtatctgcagatgaacagcctgagagccgaggacacggccgtatattactgtgcgaaaggcagcggatttgactactggggccaaggaaccctggtcaccgtctcgagcgctagtgtggccgctccctccgtgtttatctttcccccatccgatgaacagctgaaaagcggcaccgcctccgtcgtgtgtctgctgaacaatttttaccctagggaagctaaagtgcagtggaaagtggataacgcactgcagtccggcaactcccaggaatctgtgacagaacaggactccaaggacagcacctactccctgtcctccaccctgacactgtctaaggctgattatgagaaacacaaagtctacgcctgcgaagtcacccatcagggcctgagctcgcccgtcacaaagagcttcaacaggggagagtgtgacaaaactcacacatgcccaccgtgcccagcacctgaagctgcagggggaccgtcagtcttcctcttccccccaaaacccaaggacaccctcatgatctcccggacccctgaggtcacatgcgtggtggtggacgtgagccacgaagaccctgaggtcaagttcaactggtacgtggacggcgtggaggtgcataatgccaagacaaagccgcgggaggagcagtacaacagcacgtaccgtgtggtcagcgtcctcaccgtcctgcaccaggactggctgaatggcaaggagtacaagtgcaaggtctccaacaaagccctcggcgcccccatcgagaaaaccatctccaaagccaaagggcagccccgagaaccacaggtgtgcaccctgcccccatcccgggatgagctgaccaagaaccaggtcagcctctcgtgcgcagtcaaaggcttctatcccagcgacatcgccgtggagtgggagagcaatgggcagccggagaacaactacaagaccacgcctcccgtgctggactccgacggctccttcttcctcgtgagcaagctcaccgtggacaagagcaggtggcagcaggggaacgtcttctcatgctccgtgatgcatgaggctctgcacaaccactacacgcagaagagcctctccctgtctccgggtggaggcggcggaagcggaggaggaggatccagagagggccctgagctgagccctgatgatcctgccggactgctggacctgcggcagggaatgtttgcccagctggtggcccagaacgtgctgctgatcgatggccccctgtcctggtacagcgatcctggactggctggcgtgtcactgacaggcggcctgagctacaaagaggacaccaaagaactggtggtggccaaggccggcgtgtactacgtgttctttcagctggaactgcggagagtggtggccggcgaaggatctggctctgtgtctctggccctgcatctgcagcctctgagatctgctgctggcgccgctgctctggcactgacagtggatctgcctcctgccagcagcgaggcccggaatagcgcatttgggtttcaaggcaggctgctgcacctgtctgccggccagaggctgggagtgcatctgcacacagaggccagggctagacacgcctggcagctgacacagggcgctacagtgctgggcctgttcagagtgacccccgagattcctgccgggctc

SEQ ID NO: 232 - protein, 636 aa, Artificial Sequence
  Description of Artificial Sequence: Synthetic polypeptide
  DP47(VH-CL) Fc hole dimeric 4-1BB ligand (71-248) chain
EVQLLESGGGLVQPGGSLRLSCAASGFTFSSYAMSWVRQAPGKGLEWVSAISGSGGSTYYADSVKGRFTISRDNSKNTLYLQMNSLRAEDTAVYYCAKGSGFDYWGQGTLVTVSSASVAAPSVFIFPPSDEQLKSGTASVVCLLNNFYPREAKVQWKVDNALQSGNSQESVTEQDSKDSTYSLSSTLTLSKADYEKHKVYACEVTHQGLSSPVTKSFNRGECDKTHTCPPCPAPEAAGGPSVFLFPPKPKDTLMISRTPEVTCVVVDVSHEDPEVKFNWYVDGVEVHNAKTKPREEQYNSTYRVVSVLTVLHQDWLNGKEYKCKVSNKALGAPIEKTISKAKGQPREPQVCTLPPSRDELTKNQVSLSCAVKGFYPSDIAVEWESNGQPENNYKTTPPVLDSDGSFFLVSKLTVDKSRWQQGNVFSCSVMHEALHNHYTQKSLSLSPGGGGGSGGGGSREGPELSPDDPAGLLDLRQGMFAQLVAQNVLLIDGPLSWYSDPGLAGVSLTGGLSYKEDTKELVVAKAGVYYVFFQLELRRVVAGEGSGSVSLALHLQPLRSAAGAAALALTVDLPPASSEARNSAFGFQGRLLHLSAGQRLGVHLHTEARARHAWQLTQGATVLGLFRVTPEIPAGL

SEQ ID NO: 233 - DNA, 1908 bp, Artificial Sequence; identical to SEQ ID NO: 231
  Description of Artificial Sequence: Synthetic polynucleotide
  nucleotide sequence of DP47 (VH-CL) Fc hole monomeric 4-1BBL (71-248) chain

SEQ ID NO: 234 - protein, 636 aa, Artificial Sequence; identical to SEQ ID NO: 232
  Description of Artificial Sequence: Synthetic polypeptide
  DP47 (VH-CL) Fc hole monomeric 4-1BBL (71-248) chain

SEQ ID NO: 235 - DNA, 1341 bp, Artificial Sequence
  Description of Artificial Sequence: Synthetic polynucleotide
  nucleotide sequence of anti-FAP (4B9) Fc hole chain
gaggtgcagctgctcgaaagcggcggaggactggtgcagcctggcggcagcctgagactgtcttgcgccgccagcggcttcaccttcagcagctacgccatgagctgggtccgccaggcccctggcaagggactggaatgggtgtccgccatcatcggctctggcgccagcacctactacgccgacagcgtgaagggccggttcaccatcagccgggacaacagcaagaacaccctgtacctgcagatgaacagcctgcgggccgaggacaccgccgtgtactactgcgccaagggatggttcggcggcttcaactactggggacagggcaccctggtcacagtgtccagcgctagcaccaagggcccctccgtgttccccctggcccccagcagcaagagcaccagcggcggcacagccgctctgggctgcctggtcaaggactacttccccgagcccgtgaccgtgtcctggaacagcggagccctgacctccggcgtgcacaccttccccgccgtgctgcagagttctggcctgtatagcctgagcagcgtggtcaccgtgccttctagcagcctgggcacccagacctacatctgcaacgtgaaccacaagcccagcaacaccaaggtggacaagaaggtggagcccaagagctgcgacaaaactcacacatgcccaccgtgcccagcacctgaagctgcagggggaccgtcagtcttcctcttccccccaaaacccaaggacaccctcatgatctcccggacccctgaggtcacatgcgtggtggtggacgtgagccacgaagaccctgaggtcaagttcaactggtacgtggacggcgtggaggtgcataatgccaagacaaagccgcgggaggagcagtacaacagcacgtaccgtgtggtcagcgtcctcaccgtcctgcaccaggactggctgaatggcaaggagtacaagtgcaaggtctccaacaaagccctcggcgcccccatcgagaaaaccatctccaaagccaaagggcagccccgagaaccacaggtgtgcaccctgcccccatcccgggatgagctgaccaagaaccaggtcagcctctcgtgcgcagtcaaaggcttctatcccagcgacatcgccgtggagtgggagagcaatgggcagccggagaacaactacaagaccacgcctcccgtgctggactccgacggctccttcttcctcgtgagcaagctcaccgtggacaagagcaggtggcagcaggggaacgtcttctcatgctccgtgatgcatgaggctctgcacaaccactacacgcagaagagcctctccctgtctccgggtaaa

SEQ ID NO: 236 - protein, 447 aa, Artificial Sequence
  Description of Artificial Sequence: Synthetic polypeptide
  anti-FAP (4B9) Fc hole chain
EVQLLESGGGLVQPGGSLRLSCAASGFTFSSYAMSWVRQAPGKGLEWVSAIIGSGASTYYADSVKGRFTISRDNSKNTLYLQMNSLRAEDTAVYYCAKGWFGGFNYWGQGTLVTVSSASTKGPSVFPLAPSSKSTSGGTAALGCLVKDYFPEPVTVSWNSGALTSGVHTFPAVLQSSGLYSLSSVVTVPSSSLGTQTYICNVNHKPSNTKVDKKVEPKSCDKTHTCPPCPAPEAAGGPSVFLFPPKPKDTLMISRTPEVTCVVVDVSHEDPEVKFNWYVDGVEVHNAKTKPREEQYNSTYRVVSVLTVLHQDWLNGKEYKCKVSNKALGAPIEKTISKAKGQPREPQVCTLPPSRDELTKNQVSLSCAVKGFYPSDIAVEWESNGQPENNYKTTPPVLDSDGSFFLVSKLTVDKSRWQQGNVFSCSVMHEALHNHYTQKSLSLSPGK

SEQ ID NO: 237 - DNA, 1353 bp, Artificial Sequence
  Description of Artificial Sequence: Synthetic polynucleotide
  Nucleotide sequence anti-CD19(8B8-018) Fc hole chain
caggtccagctggtgcagtccggcgccgaggtcaagaaacccggggcttctgtgaaggtttcatgcaaggcaagcggatacaccttcaccgactatatcatgcattgggtcaggcaggcccctggccaaggtctcgaatggatgggctacattaacccatataatgatggctccaaatacaccgagaagtttcagggaagagtcactatgacatctgacaccagtatcagcactgcttacatggagctgtcccgccttcggtctgatgacaccgcagtgtattactgtgccaggggcacatattactacggctcagctctgttcgactattgggggcagggaaccacagtaaccgtgagctccgctagcaccaagggcccctccgtgttccccctggcccccagcagcaagagcaccagcggcggcacagccgctctgggctgcctggtcaaggactacttccccgagcccgtgaccgtgtcctggaacagcggagccctgacctccggcgtgcacaccttccccgccgtgctgcagagttctggcctgtatagcctgagcagcgtggtcaccgtgccttctagcagcctgggcacccagacctacatctgcaacgtgaaccacaagcccagcaacaccaaggtggacaagaaggtggagcccaagagctgcgacaaaactcacacatgcccaccgtgcccagcacctgaagctgcagggggaccgtcagtcttcctcttccccccaaaacccaaggacaccctcatgatctcccggacccctgaggtcacatgcgtggtggtggacgtgagccacgaagaccctgaggtcaagttcaactggtacgtggacggcgtggaggtgcataatgccaagacaaagccgcgggaggagcagtacaacagcacgtaccgtgtggtcagcgtcctcaccgtcctgcaccaggactggctgaatggcaaggagtacaagtgcaaggtctccaacaaagccctcggcgcccccatcgagaaaaccatctccaaagccaaagggcagccccgagaaccacaggtgtgcaccctgcccccatcccgggatgagctgaccaagaaccaggtcagcctctcgtgcgcagtcaaaggcttctatcccagcgacatcgccgtggagtgggagagcaatgggcagccggagaacaactacaagaccacgcctcccgtgctggactccgacggctccttcttcctcgtgagcaagctcaccgtggacaagagcaggtggcagcaggggaacgtcttctcatgctccgtgatgcatgaggctctgcacaaccactacacgcagaagagcctctccctgtctccgggtaaa

SEQ ID NO: 238 - protein, 451 aa, Artificial Sequence
  Description of Artificial Sequence: Synthetic polypeptide
  anti-CD19(8B8-018) Fc hole chain
QVQLVQSGAEVKKPGASVKVSCKASGYTFTDYIMHWVRQAPGQGLEWMGYINPYNDGSKYTEKFQGRVTMTSDTSISTAYMELSRLRSDDTAVYYCARGTYYYGSALFDYWGQGTTVTVSSASTKGPSVFPLAPSSKSTSGGTAALGCLVKDYFPEPVTVSWNSGALTSGVHTFPAVLQSSGLYSLSSVVTVPSSSLGTQTYICNVNHKPSNTKVDKKVEPKSCDKTHTCPPCPAPEAAGGPSVFLFPPKPKDTLMISRTPEVTCVVVDVSHEDPEVKFNWYVDGVEVHNAKTKPREEQYNSTYRVVSVLTVLHQDWLNGKEYKCKVSNKALGAPIEKTISKAKGQPREPQVCTLPPSRDELTKNQVSLSCAVKGFYPSDIAVEWESNGQPENNYKTTPPVLDSDGSFFLVSKLTVDKSRWQQGNVFSCSVMHEALHNHYTQKSLSLSPGK

SEQ ID NO: 239 - DNA, 2166 bp, Artificial Sequence
  Description of Artificial Sequence: Synthetic polynucleotide
  nucleotide sequence of dimeric hu 4-1BBL (71-254) - CL* Fc knob chain
agagagggccctgagctgagccccgatgatcctgctggactgctggacctgcggcagggcatgtttgctcagctggtggcccagaacgtgctgctgatcgatggccccctgtcctggtacagcgatcctggactggctggcgtgtcactgacaggcggcctgagctacaaagaggacaccaaagaactggtggtggccaaggccggcgtgtactacgtgttctttcagctggaactgcggagagtggtggccggcgaaggatctggctctgtgtctctggccctgcatctgcagcctctgagaagcgctgctggcgctgcagctctggcactgacagtggatctgcctcctgccagctccgaggcccggaatagcgcatttgggtttcaaggcaggctgctgcacctgtctgccggccagaggctgggagtgcatctgcacacagaggccagggctagacacgcctggcagctgacacagggcgctacagtgctgggcctgttcagagtgacccccgagattccagccggcctgccttctccaagaagcgaaggcggaggcggatctggcggcggaggatctagagagggacccgaactgtcccctgacgatccagccgggctgctggatctgagacagggaatgttcgcccagctggtggctcagaatgtgctgctgattgacggacctctgagctggtactccgacccagggctggcaggggtgtccctgactgggggactgtcctacaaagaagatacaaaagaactggtggtggctaaagctggggtgtactatgtgttttttcagctggaactgaggcgggtggtggctggggagggctcaggatctgtgtccctggctctgcatctgcagccactgcgctctgctgctggcgcagctgcactggctctgactgtggacctgccaccagcctctagcgaggccagaaacagcgccttcgggttccaaggacgcctgctgcatctgagcgccggacagcgcctgggagtgcatctgcatactgaagccagagcccggcatgcttggcagctgactcagggggcaactgtgctgggactgtttcgcgtgacacctgagatccctgccggactgccaagccctagatcagaagggggcggaggttccggagggggaggatctcgtacggtggctgcaccatctgtctttatcttcccacccagcgaccggaagctgaagtctggcacagccagcgtcgtgtgcctgctgaataacttctacccccgcgaggccaaggtgcagtggaaggtggacaatgccctgcagagcggcaacagccaggaaagcgtgaccgagcaggacagcaaggactccacctacagcctgagcagcaccctgaccctgagcaaggccgactacgagaagcacaaggtgtacgcctgcgaagtgacccaccagggcctgtctagccccgtgaccaagagcttcaaccggggcgagtgcgacaagacccacacctgtcctccatgccctgcccctgaagctgctggcggccctagcgtgttcctgttccccccaaagcccaaggacaccctgatgatcagccggacccctgaagtgacctgcgtggtggtggatgtgtcccacgaggaccctgaagtgaagttcaattggtacgtggacggcgtggaagtgcacaatgccaagaccaagccgcgggaggagcagtacaacagcacgtaccgtgtggtcagcgtcctcaccgtcctgcaccaggactggctgaatggcaaggagtacaagtgcaaggtctccaacaaagccctcggcgcccccatcgagaaaaccatctccaaagccaaagggcagccccgagaaccacaggtgtacaccctgcccccatgccgggatgagctgaccaagaaccaggtcagcctgtggtgcctggtcaaaggcttctatcccagcgacatcgccgtggagtgggagagcaatgggcagccggagaacaactacaagaccacgcctcccgtgctggactccgacggctccttcttcctctacagcaagctcaccgtggacaagagcaggtggcagcaggggaacgtcttctcatgctccgtgatgcatgaggctctgcacaaccactacacgcagaagagcctctccctgtctccgggtaaa

SEQ ID NO: 240 - DNA, 891 bp, Artificial Sequence
  Description of Artificial Sequence: Synthetic polynucleotide
  nucleotide sequence of monomeric hu 4-1BBL (71-254) - CH1*
agagagggccctgagctgagccccgatgatcctgctggactgctggacctgcggcagggcatgtttgctcagctggtggcccagaacgtgctgctgatcgatggccccctgtcctggtacagcgatcctggactggctggcgtgtcactgacaggcggcctgagctacaaagaggacaccaaagaactggtggtggccaaggccggcgtgtactacgtgttctttcagctggaactgcggagagtggtggccggcgaaggatctggctctgtgtctctggccctgcatctgcagcctctgagaagcgctgctggcgctgcagctctggctctgacagtggatctgcctcctgccagctccgaggcccggaatagcgcatttgggtttcaaggccggctgctgcacctgtctgccggccagagactgggagtgcatctgcacacagaggccagagccaggcacgcctggcagctgacacagggcgctacagtgctgggcctgttcagagtgacccccgagattcctgccggcctgcctagccctagatctgaaggcggcggaggttccggaggcggaggatctgctagcacaaagggccccagcgtgttccctctggcccctagcagcaagagcacatctggcggaacagccgccctgggctgcctggtggaagattacttccccgagcccgtgaccgtgtcctggaattctggcgccctgacaagcggcgtgcacacctttccagccgtgctgcagagcagcggcctgtactctctgagcagcgtcgtgacagtgcccagcagctctctgggcacccagacctacatctgcaacgtgaaccacaagcccagcaacaccaaggtggacgagaaggtggaacccaagtcctgc

SEQ ID NO: 241 - DNA, 1353 bp, Artificial Sequence
  Description of Artificial Sequence: Synthetic polynucleotide
  nucleotide sequence of anti- CD19(8B8-2B11) Fc hole chain
caggtgcaattggttcaatctggtgctgaagtaaaaaaaccgggcgcttccgttaaagtgagctgcaaagcatctggttacaccttcactgactatatcatgcactgggttcgtcaggccccgggccagggtctggagtggatgggctacattaacccatacaacgacggttccaaatataccgagaaattccagggccgcgtcacgatgaccagcgacacttctatctccaccgcgtacatggaactgtctagactgcgttctgacgacaccgctgtttactattgtgcacgcggtacctactactacggtccacagctgtttgattactggggccaaggtaccacggtgaccgtaagctctgctagcaccaagggcccctccgtgttccccctggcccccagcagcaagagcaccagcggcggcacagccgctctgggctgcctggtcaaggactacttccccgagcccgtgaccgtgtcctggaacagcggagccctgacctccggcgtgcacaccttccccgccgtgctgcagagttctggcctgtatagcctgagcagcgtggtcaccgtgccttctagcagcctgggcacccagacctacatctgcaacgtgaaccacaagcccagcaacaccaaggtggacaagaaggtggagcccaagagctgcgacaaaactcacacatgcccaccgtgcccagcacctgaagctgcagggggaccgtcagtcttcctcttccccccaaaacccaaggacaccctcatgatctcccggacccctgaggtcacatgcgtggtggtggacgtgagccacgaagaccctgaggtcaagttcaactggtacgtggacggcgtggaggtgcataatgccaagacaaagccgcgggaggagcagtacaacagcacgtaccgtgtggtcagcgtcctcaccgtcctgcaccaggactggctgaatggcaaggagtacaagtgcaaggtctccaacaaagccctcggcgcccccatcgagaaaaccatctccaaagccaaagggcagccccgagaaccacaggtgtgcaccctgcccccatcccgggatgagctgaccaagaaccaggtcagcctctcgtgcgcagtcaaaggcttctatcccagcgacatcgccgtggagtgggagagcaatgggcagccggagaacaactacaagaccacgcctcccgtgctggactccgacggctccttcttcctcgtgagcaagctcaccgtggacaagagcaggtggcagcaggggaacgtcttctcatgctccgtgatgcatgaggctctgcacaaccactacacgcagaagagcctctccctgtctccgggtaaa

SEQ ID NO: 242 - protein, 722 aa, Artificial Sequence
  Description of Artificial Sequence: Synthetic polypeptide
  Dimeric hu 4-1BBL (71-254) - CL* Fc knob chain
REGPELSPDDPAGLLDLRQGMFAQLVAQNVLLIDGPLSWYSDPGLAGVSLTGGLSYKEDTKELVVAKAGVYYVFFQLELRRVVAGEGSGSVSLALHLQPLRSAAGAAALALTVDLPPASSEARNSAFGFQGRLLHLSAGQRLGVHLHTEARARHAWQLTQGATVLGLFRVTPEIPAGLPSPRSEGGGGSGGGGSREGPELSPDDPAGLLDLRQGMFAQLVAQNVLLIDGPLSWYSDPGLAGVSLTGGLSYKEDTKELVVAKAGVYYVFFQLELRRVVAGEGSGSVSLALHLQPLRSAAGAAALALTVDLPPASSEARNSAFGFQGRLLHLSAGQRLGVHLHTEARARHAWQLTQGATVLGLFRVTPEIPAGLPSPRSEGGGGSGGGGSRTVAAPSVFIFPPSDRKLKSGTASVVCLLNNFYPREAKVQWKVDNALQSGNSQESVTEQDSKDSTYSLSSTLTLSKADYEKHKVYACEVTHQGLSSPVTKSFNRGECDKTHTCPPCPAPEAAGGPSVFLFPPKPKDTLMISRTPEVTCVVVDVSHEDPEVKFNWYVDGVEVHNAKTKPREEQYNSTYRVVSVLTVLHQDWLNGKEYKCKVSNKALGAPIEKTISKAKGQPREPQVYTLPPCRDELTKNQVSLWCLVKGFYPSDIAVEWESNGQPENNYKTTPPVLDSDGSFFLYSKLTVDKSRWQQGNVFSCSVMHEALHNHYTQKSLSLSPGK

SEQ ID NO: 243 - protein, 297 aa, Artificial Sequence
  Description of Artificial Sequence: Synthetic polypeptide
  Monomeric hu 4-1BBL (71-254) - CH1*
REGPELSPDDPAGLLDLRQGMFAQLVAQNVLLIDGPLSWYSDPGLAGVSLTGGLSYKEDTKELVVAKAGVYYVFFQLELRRVVAGEGSGSVSLALHLQPLRSAAGAAALALTVDLPPASSEARNSAFGFQGRLLHLSAGQRLGVHLHTEARARHAWQLTQGATVLGLFRVTPEIPAGLPSPRSEGGGGSGGGGSASTKGPSVFPLAPSSKSTSGGTAALGCLVEDYFPEPVTVSWNSGALTSGVHTFPAVLQSSGLYSLSSVVTVPSSSLGTQTYICNVNHKPSNTKVDEKVEPKSC

SEQ ID NO: 244 - protein, 451 aa, Artificial Sequence
  Description of Artificial Sequence: Synthetic polypeptide
  CD19(8B8-2B11) Fc hole chain
QVQLVQSGAEVKKPGASVKVSCKASGYTFTDYIMHWVRQAPGQGLEWMGYINPYNDGSKYTEKFQGRVTMTSDTSISTAYMELSRLRSDDTAVYYCARGTYYYGPQLFDYWGQGTTVTVSSASTKGPSVFPLAPSSKSTSGGTAALGCLVKDYFPEPVTVSWNSGALTSGVHTFPAVLQSSGLYSLSSVVTVPSSSLGTQTYICNVNHKPSNTKVDKKVEPKSCDKTHTCPPCPAPEAAGGPSVFLFPPKPKDTLMISRTPEVTCVVVDVSHEDPEVKFNWYVDGVEVHNAKTKPREEQYNSTYRVVSVLTVLHQDWLNGKEYKCKVSNKALGAPIEKTISKAKGQPREPQVCTLPPSRDELTKNQVSLSCAVKGFYPSDIAVEWESNGQPENNYKTTPPVLDSDGSFFLVSKLTVDKSRWQQGNVFSCSVMHEALHNHYTQKSLSLSPGK

SEQ ID NO: 245 - protein, 15 aa, Artificial Sequence
  Description of Artificial Sequence: Synthetic peptide
  avi tag
GLNDIFEAQKIEWHE

1. A TNF family ligand trimer-containing antigen binding molecule comprising
(a) one Fab domain capable of specific binding to a target cell antigen,
(b) a Fc domain composed of a first and a second subunit capable of stable association, and
(c) a first polypeptide comprising two ectodomains of a TNF ligand family member or fragments thereof that are connected to each other by a peptide linker and a second polypeptide comprising one ectodomain of said TNF ligand family member or a fragment thereof, wherein the first polypeptide is fused at its N-terminus to the C-terminus to one of the subunits of the Fc domain and wherein the second polypeptide is fused at its N-terminus to the C-terminus of the other subunit of the Fc domain,
wherein the TNF family ligand trimer-containing antigen binding molecule is monovalent for the binding to the target cell antigen.

2. The TNF family ligand trimer-containing antigen binding molecule of claim 1, wherein the TNF ligand family member costimulates human T-cell activation.

3. The TNF family ligand trimer-containing antigen binding molecule of claim 1, wherein the TNF ligand family member is selected from 4-1BBL and OX40L.

4. The TNF family ligand trimer-containing antigen binding molecule of claim 1, wherein the TNF ligand family member is 4-1BBL.

5. The TNF family ligand trimer-containing antigen binding molecule of claim 4, wherein the ectodomain of a TNF ligand family member comprises the amino acid sequence selected from the group consisting of SEQ ID NO:1, SEQ ID NO: 2, SEQ ID NO:3, SEQ ID NO:4, SEQ ID NO:5, SEQ ID NO:6, SEQ ID NO:7 and SEQ ID NO:8.

6. The TNF family ligand trimer-containing antigen binding molecule of claim 4, wherein the first polypeptide comprising two ectodomains of a TNF ligand family member or fragments thereof comprises an amino acid sequence selected from the group consisting of SEQ ID NO:9 and SEQ ID NO:10 and the second polypeptide comprising one ectodomain of said TNF ligand family member or a fragment thereof comprises the amino acid sequence selected from the group consisting of SEQ ID NO:1 and SEQ ID NO:5.

7. The TNF family ligand trimer-containing antigen binding molecule of claim 1, wherein the TNF ligand family member is OX40L.

8. The TNF family ligand trimer-containing antigen binding molecule of claim 7, wherein the ectodomain of a TNF ligand family member comprises the amino acid sequence selected from the group consisting of SEQ ID NO:11 and SEQ ID NO:12.

9. The TNF family ligand trimer-containing antigen binding molecule of claim 1, wherein the target cell antigen is selected from the group consisting of Fibroblast Activation Protein (FAP), Melanoma-associated Chondroitin Sulfate Proteoglycan (MCSP), Epidermal Growth Factor Receptor (EGFR), Carcinoembryonic Antigen (CEA), CD19, CD20 and CD33.

10. The TNF family ligand trimer-containing antigen binding molecule of claim 1, wherein the target cell antigen is Fibroblast Activation Protein (FAP).

11. The TNF family ligand trimer-containing antigen binding molecule of claim 10, wherein the Fab domain capable of specific binding to FAP comprises
(a) a VH domain comprising (i) CDR-H1 comprising the amino acid sequence of SEQ ID NO:13, (ii) CDR-H2 comprising the amino acid sequence of SEQ ID NO:14 and (iii) CDR-H3 comprising the amino acid sequence of SEQ ID NO:15, and a VL domain comprising (iv) CDR-L1 comprising the amino acid sequence of SEQ ID NO:16, (v) CDR-L2 comprising the amino acid sequence of SEQ ID NO:17 and (vi) CDR-L3 comprising the amino acid sequence of SEQ ID NO:18 or
(b) a VH domain comprising (i) CDR-H1 comprising the amino acid sequence of SEQ ID NO:19, (ii) CDR-H2 comprising the amino acid sequence of SEQ ID NO:20 and (iii) CDR-H3 comprising the amino acid sequence of SEQ ID NO:21, and a VL domain comprising (iv) CDR-L1 comprising the amino acid sequence of SEQ ID NO:22, (v) CDR-L2 comprising the amino acid sequence of SEQ ID NO:23 and (vi) CDR-L3 comprising the amino acid sequence of SEQ ID NO:24.

12. The TNF family ligand trimer-containing antigen binding molecule of claim 10, wherein the Fab domain capable of specific binding to FAP comprises a variable heavy chain comprising an amino acid sequence of SEQ ID NO:25 and a variable light chain comprising an amino acid sequence of SEQ ID NO:26 or wherein the Fab domain capable of specific binding to FAP comprises a variable heavy chain comprising an amino acid sequence of SEQ ID NO:27 and a variable light chain comprising an amino acid sequence of SEQ ID NO:28.

13. The TNF family ligand trimer-containing antigen binding molecule of claim 1, wherein the target cell antigen is CD19.

14. The TNF family ligand trimer-containing antigen binding molecule of claim 13, wherein Fab domain capable of specific binding to CD19 comprises
(a) a VH domain comprising (i) CDR-H1 comprising the amino acid sequence of SEQ ID NO:29, (ii) CDR-H2 comprising the amino acid sequence of SEQ ID NO:30 and (iii) CDR-H3 comprising the amino acid sequence of SEQ ID NO:31, and a VL domain comprising (iv) CDR-L1 comprising the amino acid sequence of SEQ ID NO:32, (v) CDR-L2 comprising the amino acid sequence of SEQ ID NO:33 and (vi) CDR-L3 comprising the amino acid sequence of SEQ ID NO:34 or
(b) a VH domain comprising (i) CDR-H1 comprising the amino acid sequence of SEQ ID NO:35, (ii) CDR-H2 comprising the amino acid sequence of SEQ ID NO:36 and (iii) CDR-H3 comprising the amino acid sequence of SEQ ID NO:37, and a VL domain comprising (iv) CDR-L1 comprising the amino acid sequence of SEQ ID NO:38, (v) CDR-L2 comprising the amino acid sequence of SEQ ID NO:39 and (vi) CDR-L3 comprising the amino acid sequence of SEQ ID NO:40.

15. The TNF family ligand trimer-containing antigen binding molecule of claim 13, wherein the Fab domain capable of specific binding to CD19 comprises a variable heavy chain comprising an amino acid sequence of SEQ ID NO:41 and a variable light chain comprising an amino acid sequence of SEQ ID NO:42 or wherein the Fab domain capable of specific binding to FAP comprises a variable heavy chain comprising an amino acid sequence of SEQ ID NO:43 and a variable light chain comprising an amino acid sequence of SEQ ID NO:44.

16. The TNF family ligand trimer-containing antigen binding molecule of claim 1, wherein the target cell antigen is CEA.

17. The TNF family ligand trimer-containing antigen binding molecule of claim 16, wherein Fab domain capable of specific binding to CEA comprises a VH domain comprising (i) CDR-H1 comprising the amino acid sequence of SEQ ID NO:45, (ii) CDR-H2 comprising the amino acid sequence of SEQ ID NO:46 and (iii) CDR-H3 comprising the amino acid sequence of SEQ ID NO:47, and a VL domain comprising (iv) CDR-L1 comprising the amino acid sequence of SEQ ID NO:48, (v) CDR-L2 comprising the amino acid sequence of SEQ ID NO:49 and (vi) CDR-L3 comprising the amino acid sequence of SEQ ID NO:50.

18. The TNF family ligand trimer-containing antigen binding molecule of claim 16, wherein the Fab domain capable of specific binding to CEA comprises a variable heavy chain comprising an amino acid sequence of SEQ ID NO:51 and a variable light chain comprising an amino acid sequence of SEQ ID NO:52.

19. The TNF family ligand trimer-containing antigen binding molecule of claim 1, wherein the Fc domain composed of a first and a second subunit capable of stable association is an IgG domain, in particular an IgG1 domain.

20. The TNF family ligand trimer-containing antigen binding molecule of claim 1, wherein the Fc domain comprises one or more amino acid substitution that reduces binding to an Fc receptor, in particular towards Fcγ receptor.

21. The TNF family ligand trimer-containing antigen binding molecule of claim 1, wherein the Fc domain is an IgG1 Fc domain comprising amino acid substitutions at positions 234 and 235 (numbering according to Kabat EU index) and/or 329 (numbering according to Kabat EU index).

22. The TNF family ligand trimer-containing antigen binding molecule of claim 1, wherein the first subunit of the Fc domain comprises the amino acid substitutions S354C and T366W (numbering according to Kabat EU index) and the second subunit of the Fc domain comprises the amino acid substitutions Y349C, T366S, L368A and Y407V (numbering according to Kabat EU index).

23. The TNF family ligand trimer-containing antigen binding molecule of claim 1, comprising
(a) a Fab domain capable of specific binding to a target cell antigen,
(b) a Fc domain composed of a first and a second subunit capable of stable association, and
(c) a first polypeptide comprising two ectodomains of a TNF ligand family member or fragments thereof that are connected to each other by a peptide linker and a second polypeptide comprising one ectodomain of said TNF ligand family member or a fragment thereof, wherein the first polypeptide is fused at its N-terminus to the C-terminus to the second subunit of the Fc domain comprising the knob mutations and wherein the second polypeptide is fused at its N-terminus to the C-terminus of the first subunit of the Fc domain comprising the hole mutations and wherein the VH and CH1 domain of the Fab domain capable of specific binding to a target cell antigen is fused at the C-terminus to the N-terminus of the second subunit of the Fc domain comprising the knob mutations.

24. The TNF family ligand trimer-containing antigen binding molecule of claim 1, comprising
(a) a Fab domain capable of specific binding to a target cell antigen,
(b) a Fc domain composed of a first and a second subunit capable of stable association, and
(c) a first polypeptide comprising two ectodomains of a TNF ligand family member or fragments thereof that are connected to each other by a peptide linker and a second polypeptide comprising one ectodomain of said TNF ligand family member or a fragment thereof, wherein the first polypeptide is fused at its N-terminus to the C-terminus to the second subunit of the Fc domain comprising the knob mutations and wherein the second polypeptide is fused at its N-terminus to the C-terminus of the first subunit of the Fc domain comprising the hole mutations and wherein the VH and CH1 domain of the Fab domain capable of specific binding to a target cell antigen is fused at the C-terminus to the N-terminus of the first subunit of the Fc domain comprising the hole mutations.

25. The TNF family ligand trimer-containing antigen binding molecule of claim 1, comprising
(a) a Fab domain capable of specific binding to a target cell antigen,
(b) a Fc domain composed of a first and a second subunit capable of stable association, and
(c) a first polypeptide comprising two ectodomains of a TNF ligand family member or fragments thereof that are connected to each other by a peptide linker and a second polypeptide comprising one ectodomain of said TNF ligand family member or a fragment thereof, wherein the first polypeptide is fused at its N-terminus to the C-terminus to the first subunit of the Fc domain comprising the hole mutations and wherein the second polypeptide is fused at its N-terminus to the C-terminus of the second subunit of the Fc domain comprising the knob mutations and wherein the VH and CH1 domain of the Fab domain capable of specific binding to a target cell antigen is fused at the C-terminus to the N-terminus of the second subunit of the Fc domain comprising the knob mutations.

26. The TNF family ligand trimer-containing antigen binding molecule of claim 1, comprising
(a) a Fab domain capable of specific binding to a target cell antigen,
(b) a Fc domain composed of a first and a second subunit capable of stable association, and
(c) a first polypeptide comprising two ectodomains of a TNF ligand family member or fragments thereof that are connected to each other by a peptide linker and a second polypeptide comprising one ectodomain of said TNF ligand family member or a fragment thereof, wherein the first polypeptide is fused at its N-terminus to the C-terminus to the first subunit of the Fc domain comprising the hole mutations and wherein the second polypeptide is fused at its N-terminus to the C-terminus of the second subunit of the Fc domain comprising the knob mutations and wherein the VH and CH1 domain of the Fab domain capable of specific binding to a target cell antigen is fused at the C-terminus to the N-terminus of the first subunit of the Fc domain comprising the hole mutations.

27. The TNF family ligand trimer-containing antigen binding molecule of claim 1 further comprising
(d) a Fab domain that is not capable of specific binding to a target cell antigen.

28. An isolated polynucleotide encoding the TNF family ligand trimer-containing antigen binding molecule of claim 1.

29. A vector, particularly an expression vector, comprising the isolated polynucleotide of claim 28.

30. A host cell comprising the isolated polynucleotide of claim 28 or the vector of claim 29.

31. A method for producing the TNF family ligand trimer-containing antigen binding molecule of claim 1, comprising culturing the host cell of claim 30 under conditions suitable for expression of the antigen binding molecule and recovering the antigen binding molecule.

32. A pharmaceutical composition comprising the TNF family ligand trimer-containing antigen binding molecule of claim 1, and at least one pharmaceutically acceptable excipient.

33-35. (canceled)

36. A method of treating a disease in an individual, comprising administering to said individual a therapeutically effective amount of a composition comprising a TNF family ligand trimer-containing antigen binding molecule of claim 1 in a pharmaceutically acceptable form.
